(19) United States
(12) Patent Application Publication
(10) Pub. No.: US 2022/0033800 A1
(43) Pub. Date: Feb. 3, 2022

(54) ENGINEERED BIOSYNTHETIC PATHWAYS FOR PRODUCTION OF 1,5-DIAMINOPENTANE BY FERMENTATION

(71) Applicant: Zymergen Inc., Emeryville, CA (US)

(72) Inventors: Aaron Miller, Emeryville, CA (US); Zhihao Wang, Emeryville, CA (US); Jeffrey Mellin, Emeryville, CA (US); Murtaza Shabbir Hussain, Emeryville, CA (US); Steven M. Edgar, Albany, CA (US)

(73) Assignee: Zymergen Inc., Emeryville, CA (US)

(21) Appl. No.: 17/297,383

(22) PCT Filed: Nov. 21, 2019
(86) PCT No.: PCT/US2019/062664

§ 371 Date: May 26, 2021

Related U.S. Application Data
(60) Provisional application No. 62/774,016, filed on Nov. 30, 2018.

(51) Int. Cl. C12N 9/88; C12P 13/00

(52) U.S. Cl. CPC C12N 9/88; C12P 13/001; C12Y 401/01018

(57) ABSTRACT

The present disclosure describes the engineering of microbial cells for fermentative production of 1,5-diaminopentane and provides novel engineered microbial cells and cultures, as well as related 1,5-diaminopentane production methods.

### CROSS-REFERENCE TO RELATED APPLICATIONS

[0001] This application claims priority to and benefit of U.S. provisional application No. 62/774,016, filed on Nov. 30, 2018, which is hereby incorporated by reference in its entirety.

### STATEMENT AS TO RIGHTS TO INVENTIONS MADE UNDER FEDERALLY SPONSORED RESEARCH AND DEVELOPMENT

[0002] This invention was made with Government support under Agreement No. HR0011-15-9-0014, awarded by DARPA. The Government has certain rights in the invention.

### INCORPORATION BY REFERENCE OF THE SEQUENCE LISTING

[0003] This application includes a sequence listing which has been submitted electronically in ASCII format and is hereby incorporated by reference in its entirety. This ASCII copy, created on Nov. 20, 2019, is named ZMGNP026WO_SL.txt. and is 1,590,352 bytes in size.

### FIELD OF THE DISCLOSURE

[0004] The present disclosure relates generally to the area of engineering microbes for production of 1,5-diaminopentane by fermentation.

### BACKGROUND

[0005] 1,5-diaminopentane is a metabolite in the degradation pathway of lysine. Specifically, 1,5-diaminopentane is produced by decarboxylation of lysine.

[0006] In zebrafish, the trace amine-associated receptor 13c (or TAAR13c) has been identified as a high-affinity receptor for cadaverin.[5] In humans, molecular modelling and docking experiments have shown that cadaverine fits into the binding pocket of the human TAAR6 and TAAR8.

[0007] 1,5-diaminopentane is a chemical precursor to pentolinium, which is a ganglionic blocking agent that acts by inhibiting the nicotinic acetylcholine receptor.

### SUMMARY

[0008] The disclosure provides engineered microbial cells, cultures of the microbial cells, and methods for the production of 1,5-diaminopentane, including the following:

[0009] Embodiment 1: An engineered microbial cell that expresses a non-native lysine decarboxylase, wherein the engineered microbial cell produces 1,5-diaminopentane.

[0010] Embodiment 2: The engineered microbial cell of embodiment 1, wherein the engineered microbial cell also expresses a non-native 1,5-diaminopentane transporter.

[0011] Embodiment 3: The engineered microbial cell of embodiment 1 or embodiment 2, wherein the engineered microbial cell expresses one or more additional enzyme(s) selected from an additional non-native lysine decarboxylase and/or an additional non-native 1,5-diaminopentane transporter.

[0012] Embodiment 4: The engineered microbial cell of embodiment 3, wherein the additional enzyme(s) are from a different organism than the corresponding enzyme in embodiment 1 or embodiment 2.

[0013] Embodiment 5: The engineered microbial cell of embodiment 3 or embodiment 4, wherein the additional enzyme(s) comprise(s) one or more additional copies of the corresponding enzyme in embodiment 1 or embodiment 2.

[0014] Embodiment 6: The engineered microbial cell of any of embodiments 1-5, wherein the engineered microbial cell includes increased activity of one or more upstream lysine pathway enzyme(s), said increased activity being increased relative to a control cell.

[0015] Embodiment 7: The engineered microbial cell of any of embodiments 1-6, wherein the engineered microbial cell includes increased activity of one or more enzyme(s) that increase the supply of the reduced form of nicotinamide adenine dinucleotide phosphate (NADPH), said increased activity being increased relative to a control cell.

[0016] Embodiment 8: The engineered microbial cell of embodiment 7, wherein the one or more enzyme(s) that increase the supply of the reduced form of NADPH is selected from the group consisting of pentose phosphate pathway enzymes, NADP+-dependent glyceraldehyde 3-phosphate dehydrogenase (GAPDH), and NADP+-dependent glutamate dehydrogenase.

[0017] Embodiment 9: The engineered microbial cell of any one of embodiments 1-8, wherein the engineered microbial cell includes reduced activity of one or more enzyme(s) that consume one or more lysine pathway precursors, said reduced activity being reduced relative to a control cell.

[0018] Embodiment 10: The engineered microbial cell of any one of embodiments 1-9, wherein the engineered microbial cell includes reduced activity of a native lysine exporter, said reduced activity being reduced relative to a control cell.

[0019] Embodiment 11: The engineered microbial cell of embodiment 10, wherein the native lysine exporter is Corynebacterium glutamicum lysE or an ortholog thereof.

[0020] Embodiment 12: The engineered microbial cell of any one of embodiments 1-11, wherein the engineered microbial cell includes reduced expression of the C. glutamicum NCg10561 gene or an ortholog thereof, said reduced expression being reduced relative to a control cell.

[0021] Embodiment 13: The engineered microbial cell of any one of embodiments 1-12, wherein the engineered microbial cell includes reduced expression of the C. glutamicum trpB gene or an ortholog thereof, said reduced expression being reduced relative to a control cell.

[0022] Embodiment 14: The engineered microbial cell of any one of embodiments 9-13, wherein the reduced activity is achieved by one or more means selected from the group consisting of gene deletion, gene disruption, altering regulation of a gene, and replacing a native promoter with a less active promoter.

[0023] Embodiment 15: An engineered microbial cell, wherein the engineered microbial cell includes means for expressing a non-native lysine decarboxylase, and wherein the engineered microbial cell produces 1,5-diaminopentane.

[0024] Embodiment 16: The engineered microbial cell of embodiment 15, wherein the engineered microbial cell also includes means for expressing a non-native 1,5-diaminopentane transporter.

[0025] Embodiment 17: The engineered microbial cell of embodiment 15 or embodiment 16, wherein the engineered microbial cell means for expressing one or more additional enzyme(s) selected from an additional non-native lysine decarboxylase and/or an additional non-native 1,5-diaminopentane transporter.

[0026] Embodiment 18: The engineered microbial cell of embodiment 17, wherein the additional enzyme(s) are from a different organism than the corresponding enzyme in embodiment 15 or embodiment 16.

[0027] Embodiment 19: The engineered microbial cell of any of embodiments 15-18 wherein the engineered microbial cell includes means for increasing activity of one or more upstream lysine pathway enzyme(s), said activity being increased relative to a control cell.

[0028] Embodiment 20: The engineered microbial cell of any of embodiments 15-19, wherein the engineered microbial cell includes means for increasing activity of one or more enzyme(s) that increase the NADPH supply, said activity being increased relative to a control cell.

[0029] Embodiment 21: The engineered microbial cell of embodiment 20, wherein the one or more enzyme(s) that increase the supply of the reduced form of nicotinamide adenine dinucleotide phosphate (NADPH) is selected from the group consisting of pentose phosphate pathway enzymes, NADP+-dependent glyceraldehyde 3-phosphate dehydrogenase (GAPDH), and NADP+-dependent glutamate dehydrogenase.

[0030] Embodiment 22: The engineered microbial cell of any one of embodiments 15-21, wherein the engineered microbial cell includes means for reducing activity of one or more enzyme(s) that consume one or more lysine pathway precursors, said activity being reduced relative to a control cell.

[0031] Embodiment 23: The engineered microbial cell of any one of embodiments 15-22, wherein the engineered microbial cell includes means for reducing activity of a native lysine exporter, said activity being reduced relative to a control cell.

[0032] Embodiment 24: The engineered microbial cell of embodiment 23, wherein the native lysine exporter is Corynebacterium glutamicum lysE or an ortholog thereof.

[0033] Embodiment 25: The engineered microbial cell of any one of embodiments 15-24, wherein the engineered microbial cell includes means for reducing expression of the C. glutamicum NCg10561 gene or an ortholog thereof, said expression being reduced relative to a control cell.

[0034] Embodiment 26: The engineered microbial cell of any one of embodiments 15-25, wherein the engineered microbial cell includes means for reducing expression of the C. glutamicum trpB gene or an ortholog thereof, said expression being reduced relative to a control cell.

[0035] Embodiment 27: The engineered microbial cell of any one of embodiments 1-26, wherein the engineered microbial cell is a bacterial cell.

[0036] Embodiment 28: The engineered microbial cell of embodiment 27, wherein the bacterial cell is a cell of the genus Corynebacteria.

[0037] Embodiment 29: The engineered microbial cell of embodiment 28, wherein the bacterial cell is a cell of the species glutamicum.

[0038] Embodiment 30: The engineered microbial cell of embodiment 29, wherein the non-native lysine decarboxylase includes a lysine decarboxylase having at least 70% amino acid sequence identity with a lysine decarboxylase selected from the group consisting of Escherichia coli, Vibrio cholerae, Candidatus Burkholderia crenata, butyrate-producing bacterium, and any combination thereof.

[0039] Embodiment 31: The engineered microbial cell of embodiment 30, wherein the cell includes at least three different lysine decarboxylases.

[0040] Embodiment 32: The engineered microbial cell of embodiment 31, wherein the engineered microbial cell includes three non-native lysine decarboxylases having at least 70% amino acid sequence identity with each of the lysine decarboxylases from Escherichia coli, Candidatus Burkholderia crenata, and butyrate-producing bacterium.

[0041] Embodiment 33: The engineered microbial cell of embodiment 32, wherein the engineered microbial cell additionally includes a non-native lysine decarboxylase having at least 70% amino acid sequence identity with a lysine decarboxylase from a mine drainage metagenome.

[0042] Embodiment 34: The engineered microbial cell of embodiment 33, wherein the lysine decarboxylases from Escherichia coli, Candidatus Burkholderia crenata, butyrate-producing bacterium, and the mine drainage metagenome comprise SEQ ID NOs:87, 97, 30, and 93.

[0043] Embodiment 35: The engineered microbial cell of embodiment 27, wherein the bacterial cell is a cell of the genus Bacillus.

[0044] Embodiment 36: The engineered microbial cell of embodiment 35, wherein the bacterial cell is a cell of the species subtilis.

[0045] Embodiment 37: The engineered microbial cell of embodiment 36, wherein the non-native lysine decarboxylase includes a lysine decarboxylase having at least 70% amino acid sequence identity with a lysine decarboxylase selected from the group consisting of a Clostridium species, Staphylococcus aureus, and any combination thereof.

[0046] Embodiment 38: The engineered microbial cell of embodiment 37, wherein the cell includes at least three different lysine decarboxylases.

[0047] Embodiment 39: The engineered microbial cell of embodiment 38, wherein the engineered microbial cell includes three non-native lysine decarboxylases having at least 70% amino acid sequence identity with each of the lysine decarboxylases from Clostridium CAG:221, Clostridium CAG:288, and Staphylococcus aureus.

[0048] Embodiment 40: The engineered microbial cell of any one of embodiments 1-26, wherein the engineered microbial cell includes a fungal cell.

[0049] Embodiment 41: The engineered microbial cell of embodiment 40, wherein the engineered microbial cell includes a yeast cell.

[0050] Embodiment 42: The engineered microbial cell of embodiment 41, wherein the yeast cell is a cell of the genus Saccharomyces.

[0051] Embodiment 43: The engineered microbial cell of embodiment 42, wherein the yeast cell is a cell of the species cerevisiae.

[0052] Embodiment 44: The engineered microbial cell of any one of embodiments 1-43, wherein the non-native lysine decarboxylase includes a lysine decarboxylase having at least 70% amino acid sequence identity with a lysine decarboxylase selected from the group consisting of Yersinia enterocolitica, Castellaniella detragans, Prochorococcus marinus, and any combination thereof.

[0053] Embodiment 45: The engineered microbial cell of embodiment 44, wherein the cell includes at least three different lysine decarboxylases.

[0054] Embodiment 46: The engineered microbial cell of embodiment 45, wherein the engineered microbial cell includes three non-native lysine decarboxylases having at least 70% amino acid sequence identity with each of the lysine decarboxylases from Yersinia enterocolitica, Castellaniella detragans, and Prochorococcus marinus.

[0055] Embodiment 47: The engineered microbial cell of any one of embodiments 1-46, wherein, when cultured, the engineered microbial cell produces 1,5-diaminopentane at a level at least 5 mg/L of culture medium.

[0056] Embodiment 48: The engineered microbial cell of embodiment 47, wherein, when cultured, the engineered microbial cell produces 1,5-diaminopentane at a level at least 5 gm/L of culture medium.

[0057] Embodiment 49: The engineered microbial cell of embodiment 48, wherein, when cultured, the engineered microbial cell produces 1,5-diaminopentane at a level at least 25 gm/L of culture medium.

[0058] Embodiment 50: A method of culturing engineered microbial cells according to any one of embodiments 1-49, the method including culturing the cells under conditions suitable for producing 1,5-diaminopentane.

[0059] Embodiment 51: The method of embodiment 50, wherein the method includes fed-batch culture, with an initial glucose level in the range of 1-100 g/L, followed controlled sugar feeding.

[0060] Embodiment 52: The method of embodiment 50 or embodiment 51, wherein the fermentation substrate includes glucose and a nitrogen source selected from the group consisting of urea, an ammonium salt, ammonia, and any combination thereof.

[0061] Embodiment 53: The method of any one of embodiments 50-52, wherein the culture is pH-controlled during culturing.

[0062] Embodiment 54: The method of any one of embodiments 50-53, wherein the culture is aerated during culturing.

[0063] Embodiment 55: The method of any one of embodiments 50-54, wherein the engineered microbial cells produce 1,5-diaminopentane at a level at least 5 mg/L of culture medium.

[0064] Embodiment 56: The method of any one of embodiments 50-55, wherein the method additionally includes recovering 1,5-diaminopentane from the culture.

[0065] Embodiment 57: A method for preparing 1,5-diaminopentane using microbial cells engineered to produce 1,5-diaminopentane, the method including: (a) expressing a non-native lysine decarboxylase in microbial cells; (b) cultivating the microbial cells in a suitable culture medium under conditions that permit the microbial cells to produce 1,5-diaminopentane, wherein the 1,5-diaminopentane is released into the culture medium; and (c) isolating 1,5-diaminopentane from the culture medium.

### BRIEF DESCRIPTION OF THE DRAWINGS

[0066] FIG. 1: Biosynthetic pathway for 1,5-diaminopentane.

[0067] FIG. 2: 1,5-diaminopentane titers measured in the extracellular broth following fermentation by first-round engineered host Corynebacteria glutamicum. (See also Example 1.)

[0068] FIG. 3: 1,5-diaminopentane titers measured in the extracellular broth following fermentation by first-round engineered host Saccharomyces cerevisiae. (See also Example 1.)

[0069] FIG. 4: 1,5-diaminopentane titers measured in the extracellular broth following fermentation by first-round engineered host Bacillus subtilis. (See also Example 1.)

[0070] FIG. 5: 1,5-diaminopentane titers measured in the extracellular broth following fermentation by second-round engineered host Corynebacteria glutamicum. (See also Example 1.)

[0071] FIG. 6: 1,5-diaminopentane titers measured in the extracellular broth following fermentation by Corynebacteria glutamicum engineered to delete the NCg10561 gene (NCg10561_del) or delete the NCg12931 gene, which encodes the beta subunit of tryptophan synthase (NCg12931_P3221).

[0072] FIG. 7: Integration of Promoter-Gene-Terminator into Saccharomyces cerevisiae and Yarrowia lipolytica.

[0073] FIG. 8: Promoter replacement in Saccharomyces cerevisiae and Yarrowia lipolytica.

[0074] FIG. 9: Targeted gene deletion in Saccharomyces cerevisiae and Yarrowia lipolytica.

[0075] FIG. 10: Integration of Promoter-Gene-Terminator into Corynebacteria glutamicum and Bacillus subtilis.

[0076] FIG. 11: 1,5-diaminopentane titers measured in the extracellular broth following fermentation by third-round engineered host Corynebacteria glutamicum. (See also Example 1.)

[0077] FIG. 12: Bioreactor production runs of engineered Corynebacteria glutamicum strain CgCADAV_107 resulted a 1,5-diaminopentane titer of 27 g/L. (See Example 2.)

### DETAILED DESCRIPTION

[0078] This disclosure describes a method for the production of the small molecule 1,5-diaminopentane via fermentation by a microbial host from simple carbon and nitrogen sources, such as glucose and urea, respectively. This objective can be achieved by introducing a non-native metabolic pathway into a suitable microbial host for industrial fermentation of chemical products. Illustrative hosts include Saccharomyces cerevisiae, Yarrowia lypolytica, Corynebacteria glutamicum, and Bacillus subtilis. The engineered metabolic pathway links the central metabolism of the host to a non-native pathway to enable the production of 1,5-diaminopentane. The simplest embodiment of this approach is the expression of an enzyme, such as a non-native lysine decarboxylase enzyme, in a microbial host strain that has the other enzymes necessary for 1,5-diaminopentane production (see FIG. 1; i.e., any strain that produces lysine), which is true of all of the illustrative hosts noted above.

[0079] The following disclosure describes how to engineer a microbe with the necessary characteristics to produce industrially feasible titers of 1,5-diaminopentane from simple carbon and nitrogen sources. Active lysine decarboxylases have been identified that enable C. glutamicum, S. cerevisiae, and B. subtilis to produce 1,5-diaminopentane, and it has been found that the expression of an additional copy of lysine decarboxylase improves the 1,5-diaminopentane titers. For example, in the work described herein, titers of about 27 gm/L 1,5-diaminopentane in C. glutamicum, about 5 mg/L 1,5-diaminopentane in S. cerevisiae, and about 47 mg/L 1,5-diaminopentane in B. subtilis were achieved.

### Definitions

[0080] Terms used in the claims and specification are defined as set forth below unless otherwise specified.

[0081] The term “fermentation” is used herein to refer to a process whereby a microbial cell converts one or more substrate(s) into a desired product (such as 1,5-diaminopentane) by means of one or more biological conversion steps, without the need for any chemical conversion step.

[0082] The term “engineered” is used herein, with reference to a cell, to indicate that the cell contains at least one targeted genetic alteration introduced by man that distinguishes the engineered cell from the naturally occurring cell.

[0083] The term “native” is used herein to refer to a cellular component, such as a polynucleotide or polypeptide, that is naturally present in a particular cell. A native polynucleotide or polypeptide is endogenous to the cell.

[0084] When used with reference to a polynucleotide or polypeptide, the term “non-native” refers to a polynucleotide or polypeptide that is not naturally present in a particular cell.

[0085] When used with reference to the context in which a gene is expressed, the term “non-native” refers to a gene expressed in any context other than the genomic and cellular context in which it is naturally expressed. A gene expressed in a non-native manner may have the same nucleotide sequence as the corresponding gene in a host cell, but may be expressed from a vector or from an integration point in the genome that differs from the locus of the native gene.

[0086] The term “heterologous” is used herein to describe a polynucleotide or polypeptide introduced into a host cell. This term encompasses a polynucleotide or polypeptide, respectively, derived from a different organism, species, or strain than that of the host cell. In this case, the heterologous polynucleotide or polypeptide has a sequence that is different from any sequence(s) found in the same host cell. However, the term also encompasses a polynucleotide or polypeptide that has a sequence that is the same as a sequence found in the host cell, wherein the polynucleotide or polypeptide is present in a different context than the native sequence (e.g., a heterologous polynucleotide can be linked to a different promotor and inserted into a different genomic location than that of the native sequence). “Heterologous expression” thus encompasses expression of a sequence that is non-native to the host cell, as well as expression of a sequence that is native to the host cell in a non-native context.

[0087] As used with reference to polynucleotides or polypeptides, the term “wild-type” refers to any polynucleotide having a nucleotide sequence, or polypeptide having an amino acid, sequence present in a polynucleotide or polypeptide from a naturally occurring organism, regardless of the source of the molecule; i.e., the term “wild-type” refers to sequence characteristics, regardless of whether the molecule is purified from a natural source; expressed recombinantly, followed by purification; or synthesized. The term “wild-type” is also used to denote naturally occurring cells.

[0088] A “control cell” is a cell that is otherwise identical to an engineered cell being tested, including being of the same genus and species as the engineered cell, but lacks the specific genetic modification(s) being tested in the engineered cell.

[0089] Enzymes are identified herein by the reactions they catalyze and, unless otherwise indicated, refer to any polypeptide capable of catalyzing the identified reaction. Unless otherwise indicated, enzymes may be derived from any organism and may have a native or mutated amino acid sequence. As is well known, enzymes may have multiple functions and/or multiple names, sometimes depending on the source organism from which they derive. The enzyme names used herein encompass orthologs, including enzymes that may have one or more additional functions or a different name.

[0090] The term “feedback-deregulated” is used herein with reference to an enzyme that is normally negatively regulated by a downstream product of the enzymatic pathway (i.e., feedback-inhibition) in a particular cell. In this context, a “feedback-deregulated” enzyme is a form of the enzyme that is less sensitive to feedback-inhibition than the enzyme native to the cell or a form of the enzyme that is native to the cell, but is naturally less sensitive to feedback inhibition than one or more other natural forms of the enzyme. A feedback-deregulated enzyme may be produced by introducing one or more mutations into a native enzyme. Alternatively, a feedback-deregulated enzyme may simply be a heterologous, native enzyme that, when introduced into a particular microbial cell, is not as sensitive to feedback-inhibition as the native, native enzyme. In some embodiments, the feedback-deregulated enzyme shows no feedback-inhibition in the microbial cell.

[0091] The term “1,5-diaminopentane” refers to a chemical compound of the formula C₅H₁₄N₂ also known as “pentane-1,5-diamine” and “cadaverine” (CAS#CAS 462-94-2).

[0092] The term “sequence identity,” in the context of two or more amino acid or nucleotide sequences, refers to two or more sequences that are the same or have a specified percentage of amino acid residues or nucleotides that are the same, when compared and aligned for maximum correspondence, as measured using a sequence comparison algorithm or by visual inspection.

[0093] For sequence comparison to determine percent nucleotide or amino acid sequence identity, typically one sequence acts as a “reference sequence,” to which a “test” sequence is compared. When using a sequence comparison algorithm, test and reference sequences are input into a computer, subsequence coordinates are designated, if necessary, and sequence algorithm program parameters are designated. The sequence comparison algorithm then calculates the percent sequence identity for the test sequence relative to the reference sequence, based on the designated program parameters. Alignment of sequences for comparison can be conducted using BLAST set to default parameters.

[0094] The term “titer,” as used herein, refers to the mass of a product (e.g., 1,5-diaminopentane) produced by a culture of microbial cells divided by the culture volume.

[0095] As used herein with respect to recovering 1,5-diaminopentane from a cell culture, “recovering” refers to separating the 1,5-diaminopentane from at least one other component of the cell culture medium.

[0096] Engineering Microbes for 1,5-Diaminopentane Production

[0097] 1,5-Diaminopentane Biosynthesis Pathway

[0098] 1,5-diaminopentane is typically derived from lysine in one enzymatic step, requiring the enzyme lysine decarboxylase. The 1,5-diaminopentane biosynthesis pathway is shown in FIG. 1. This enzyme is not expressed naturally in Corynebacteria glutamicum, Saccharomyces cerevisiae, or Bacillus subtilis. 1,5-diaminopentane production is enabled in each of these hosts by the addition of at least one non-native lysine decarboxylase.

[0099] Engineering for Microbial 1,5-Diaminopentane Production

[0100] Any lysine decarboxylase that is active in the microbial cell being engineered may be introduced into the cell, typically by introducing and expressing the gene(s) encoding the enzyme(s)s using standard genetic engineering techniques. Suitable lysine decarboxylases may be derived from any source, including plant, archaeal, fungal, gram-positive bacterial, and gram-negative bacterial sources. Exemplary sources include, but are not limited to: Escherichia coli, Vibrio cholerae, Candidatus Burkholderia crenata, butyrate-producing bacterium, a Clostridium species (e.g., Clostridium CAG:221, Clostridium CAG:288), Staphylococcus aureus, Yersinia enterocolitica, Castellaniella detragans, and Prochorococcus marinus.

[0101] One or more copies of any of these genes can be introduced into a selected microbial host cell. If more than one copy of a gene is introduced, the copies can have the same or different nucleotide sequences. In some embodiments, one or both (or all) of the heterologous gene(s) is/are expressed from a strong, constitutive promoter. In some embodiments, the heterologous gene(s) is/are expressed from an inducible promoter. The heterologous gene(s) can optionally be codon-optimized to enhance expression in the selected microbial host cell.

[0102] Example 1 shows that, in Corynebacterium glutamicum, an about 300 mg/L titer of 1,5-diaminopentane was achieved in a first round of engineering after integration of the three non-native enzymes. (See FIG. 2.) This strain expressed lysine decarboxylases from of Escherichia coli (strain K12), Escherichia coli O157:H7, and Vibrio cholerae serotype 01 (strain ATCC39315/El Tor Inaba N16961).

[0103] Example 1 shows that, in Saccharomyces cerevisiae, a titer of about 5 mg/L was achieved in a first round of engineering after integration of lysine decarboxylases from each of Yersinia enterocolitica W22703, Castellaniella detragans 65Phen, and Prochorococcus marinus str. IT 9314. (See FIG. 3.)

[0104] Example 1 shows that, in Bacillus subtilis, a titer of about 47 mg/L was achieved in a first round of engineering after integration of lysine decarboxylases from each of Clostridium CAG:221, Clostridium CAG:288, and Staphylococcus aureus. (See FIG. 4.)

[0105] A second round of engineering was carried out in the C. glutamicum (Example 1). A titer of about 5.5 gm/L was achieved after integration of lysine decarboxylases from each of Escherichia coli MS 117-3, Candidatus Burkholderia crenata, and butyrate-producing bacterium SS3/4. (CgCADAV_107; see FIG. 5). A third round of engineering in C. glutamicum (Example 1), that added a lysine decarboxylase from a mine drainage metagenome (SEQ ID NO:93), to these enzymes, increased the titer to 7.0 gm/L (CgCADAV_306; see FIG. 11).

[0106] Example 2 shows that a bioreactor production run using CgCADAV_107 (expressing lysine decarboxylases from each of Escherichia coli MS 117-3, Candidatus Burkholderia crenata, and butyrate-producing bacterium SS3/4) achieved a titer of about 27 gm/L 1,5-diaminopentane.

### Increasing the Activity of Upstream Enzymes

[0107] One approach to increasing 1,5-diaminopentane production in a microbial cell that is capable of such production is to increase the activity of one or more upstream enzymes in the 1,5-diaminopentane biosynthesis pathway. Upstream pathway enzymes include all enzymes involved in the conversions from a feedstock all the way to into the last native metabolite. Illustrative enzymes, for this purpose, include, but are not limited to, those shown in FIG. 1 in the pathway from aspartate (“Asp”) to lysine. Suitable upstream pathway genes encoding these enzymes may be derived from any available source, including, for example, those discussed above as sources for a lysine decarboxylase.

[0108] In some embodiments, the activity of one or more upstream pathway enzymes is increased by modulating the expression or activity of the native enzyme(s). For example, native regulators of the expression or activity of such enzymes can be exploited to increase the activity of suitable enzymes.

[0109] Alternatively, or in addition, one or more promoters can be substituted for native promoters using, for example, a technique such as that illustrated in FIG. 8. In certain embodiments, the replacement promoter is stronger than the native promoter and/or is a constitutive promoter.

[0110] In some embodiments, the activity of one or more upstream pathway enzymes is supplemented by introducing one or more of the corresponding genes into the engineered microbial host cell. An introduced upstream pathway gene may be from an organism other than that of the host cell or may simply be an additional copy of a native gene. In some embodiments, one or more such genes are introduced into a microbial host cell capable of 1,5-diaminopentane production and expressed from a strong constitutive promoter and/or can optionally be codon-optimized to enhance expression in the selected microbial host cell.

[0111] In various embodiments, the engineering of a 1,5-diaminopentane-producing microbial cell to increase the activity of one or more upstream pathway enzymes increases the 1,5-diaminopentane titer by at least 10, 20, 30, 40, 50, 60, 70, 80, or 90 percent or by at least 2-fold, 2.5-fold, 3-fold, 3.5-fold, 4-fold, 4.5-fold, 5-fold, 5.5-fold, 6-fold, 6.5-fold, 7-fold, 7.5-fold, 8-fold, 8.5-fold, 9-fold, 9.5-fold, 10-fold, 11-fold, 12-fold, 13-fold, 14-fold, 15-fold, 16-fold, 17-fold, 18-fold, 19-fold, 20-fold, 21-fold, 22-fold, 23-fold, 24-fold, 25-fold, 30-fold, 35-fold, 40-fold, 45-fold, 50-fold, 55-fold, 60-fold, 65-fold, 70-fold, 75-fold, 80-fold, 85-fold, 90-fold, 95-fold, 100-fold, 150-fold, 200-fold, 250-fold, 300-fold, 350-fold, 400-fold, 450-fold, 500-fold, 550-fold, 600-fold, 650-fold, 700-fold, 750-fold, 800-fold, 850-fold, 900-fold, 950-fold, or 1000-fold. In various embodiments, the increase in 1,5-diaminopentane titer is in the range of 10-fold to 1000-fold, 20-fold to 500-fold, 50-fold to 400-fold, 10-fold to 300-fold, or any range bounded by any of the values listed above. (Ranges herein include their endpoints.) These increases are determined relative to the 1,5-diaminopentane titer observed in a 1,5-diaminopentane-producing microbial cell that lacks any increase in activity of upstream pathway enzymes. This reference cell may have one or more other genetic alterations aimed at increasing 1,5-diaminopentane production.

[0112] In various embodiments, the 1,5-diaminopentane titers achieved by increasing the activity of one or more upstream pathway enzymes are at least 10, 20, 30, 40, 50, 75, 100, 200, 300, 400, 500, 600, 700, 800, or 900 mg/L or at least 1, 1.5, 2, 2.5, 3, 3.5, 4, 4.5, 5, 10, 15, 20, 25, 30, 35, 40, 45, 50, 55, 60, 65, 70, 75, 80, 85, 90, 95, 100, 110, 120, 130, 140, or 150 gm/L. In various embodiments, the titer is in the range of 10 mg/L to 150 gm/L, 20 mg/L to 140 gm/L, 50 mg/L to 130 gm/L, 100 mg/L to 120 gm/L, 500 mg/L to 110 gm/L or any range bounded by any of the values listed above.

### Increasing the NADPH Supply

[0113] Another approach to increasing 1,5-diaminopentane production in a microbial cell that is capable of such production is to increase the supply of the reduced form of nicotinamide adenine dinucleotide phosphate (NADPH), which provides the reducing equivalents for biosynthetic reactions. For example, the activity of one or more enzymes that increase the NADPH supply can be increased by means similar to those described above for upstream pathway enzymes, e.g., by modulating the expression or activity of the native enzyme(s), replacing the native promoter(s) with a stronger and/or constitutive promoter, and/or introducing one or more gene(s) encoding enzymes that increase the NADPH supply. Illustrative enzymes, for this purpose, include, but are not limited to, pentose phosphate pathway enzymes, NADP+-dependent glyceraldehyde 3-phosphate dehydrogenase (GAPDH), and NADP+-dependent glutamate dehydrogenase. Such enzymes may be derived from any available source, including, for example, those discussed above as sources for a lysine decarboxylase.

[0114] In various embodiments, the engineering of a 1,5-diaminopentane-producing microbial cell to increase the activity of one or more of such enzymes increases the 1,5-diaminopentane titer by at least 10, 20, 30, 40, 50, 60, 70, 80, or 90 percent or by at least 2-fold, 2.5-fold, 3-fold, 3.5-fold, 4-fold, 4.5-fold, 5-fold, 5.5-fold, 6-fold, 6.5-fold, 7-fold, 7.5-fold, 8-fold, 8.5-fold, 9-fold, 9.5-fold, 10-fold, 11-fold, 12-fold, 13-fold, 14-fold, 15-fold, 16-fold, 17-fold, 18-fold, 19-fold, 20-fold, 21-fold, 22-fold, 23-fold, 24-fold, 25-fold, 30-fold, 35-fold, 40-fold, 45-fold, 50-fold, 55-fold, 60-fold, 65-fold, 70-fold, 75-fold, 80-fold, 85-fold, 90-fold, 95-fold, 100-fold, 150-fold, 200-fold, 250-fold, 300-fold, 350-fold, 400-fold, 450-fold, 500-fold, 550-fold, 600-fold, 650-fold, 700-fold, 750-fold, 800-fold, 850-fold, 900-fold, 950-fold, or 1000-fold. In various embodiments, the increase in 1,5-diaminopentane titer is in the range of 10-fold to 1000-fold, 20-fold to 500-fold, 50-fold to 400-fold, 10-fold to 300-fold, or any range bounded by any of the values listed above. (Ranges herein include their endpoints.) These increases are determined relative to the 1,5-diaminopentane titer observed in a 1,5-diaminopentane-producing microbial cell that lacks any increase in activity of such enzymes. This reference cell may have one or more other genetic alterations aimed at increasing 1,5-diaminopentane production.

[0115] In various embodiments, the 1,5-diaminopentane titers achieved by increasing the activity of one or more enzymes that increase the NADPH supply are at least 10, 20, 30, 40, 50, 75, 100, 200, 300, 400, 500, 600, 700, 800, or 900 mg/L or at least 1, 1.5, 2, 2.5, 3, 3.5, 4, 4.5, 5, 10, 15, 20, 25, 30, 35, 40, 45, 50, 55, 60, 65, 70, 75, 80, 85, 90, 95, 100, 110, 120, 130, 140, or 150 gm/L. In various embodiments, the titer is in the range of 10 mg/L to 150 gm/L, 20 mg/L to 140 gm/L, 50 mg/L to 130 gm/L, 100 mg/L to 120 gm/L, 500 mg/L to 110 gm/L or any range bounded by any of the values listed above.

### Feedback-Deregulated Enzymes

[0116] Since lysine biosynthesis is subject to feedback inhibition, another approach to increasing 1,5-diaminopentane production production in a microbial cell engineered to produce 1,5-diaminopentane production is to introduce feedback-deregulated forms of one or more enzymes that are normally subject to feedback regulation. Examples of such enzymes include glucose-6-phosphate dehydrogenase, ATP phosphoribosyltransferase, and aspartokinase. A feedback-deregulated form can be a heterologous, native enzyme that is less sensitive to feedback inhibition than the native enzyme in the particular microbial host cell. Alternatively, a feedback-deregulated form can be a variant of a native or heterologous enzyme that has one or more mutations or truncations rendering it less sensitive to feedback inhibition than the corresponding native enzyme.

[0117] In some embodiments, the feedback-deregulated enzyme need not be “introduced,” in the traditional sense. Rather, the microbial host cell selected for engineering can be one that has a native enzyme that is naturally insensitive to feedback inhibition.

[0118] In various embodiments, the engineering of a 1,5-diaminopentane-producing microbial cell to include one or more feedback-regulated enzymes increases the 1,5-diaminopentane titer by at least 10, 20, 30, 40, 50, 60, 70, 80, or 90 percent or by at least 2-fold, 2.5-fold, 3-fold, 3.5-fold, 4-fold, 4.5-fold, 5-fold, 5.5-fold, 6-fold, 6.5-fold, 7-fold, 7.5-fold, 8-fold, 8.5-fold, 9-fold, 9.5-fold, 10-fold, 11-fold, 12-fold, 13-fold, 14-fold, 15-fold, 16-fold, 17-fold, 18-fold, 19-fold, 20-fold, 21-fold, 22-fold, 23-fold, 24-fold, 25-fold, 30-fold, 35-fold, 40-fold, 45-fold, 50-fold, 55-fold, 60-fold, 65-fold, 70-fold, 75-fold, 80-fold, 85-fold, 90-fold, 95-fold, 100-fold, 150-fold, 200-fold, 250-fold, 300-fold, 350-fold, 400-fold, 450-fold, 500-fold, 550-fold, 600-fold, 650-fold, 700-fold, 750-fold, 800-fold, 850-fold, 900-fold, 950-fold, or 1000-fold. In various embodiments, the increase in 1,5-diaminopentane titer is in the range of 10-fold to 1000-fold, 20-fold to 500-fold, 50-fold to 400-fold, 10-fold to 300-fold, or any range bounded by any of the values listed above. These increases are determined relative to the 1,5-diaminopentane titer observed in a 1,5-diaminopentane-producing microbial cell that does not include genetic alterations to reduce feedback regulation. This reference cell may (but need not) have other genetic alterations aimed at increasing 1,5-diaminopentane production, i.e., the cell may have increased activity of an upstream pathway enzyme.

[0119] In various embodiments, the 1,5-diaminopentane titers achieved by reducing feedback deregulation are at least 10, 20, 30, 40, 50, 75, 100, 200, 300, 400, 500, 600, 700, 800, or 900 mg/L or at least 1, 1.5, 2, 2.5, 3, 3.5, 4, 4.5, 5, 10, 15, 20, 25, 30, 35, 40, 45, 50, 55, 60, 65, 70, 75, 80, 85, 90, 95, 100, 110, 120, 130, 140, or 150 gm/L. In various embodiments, the titer is in the range of 10 mg/L to 150 gm/L, 20 mg/L to 140 gm/L, 50 mg/L to 130 gm/L, 100 mg/L to 120 gm/L, 500 mg/L to 110 gm/L or any range bounded by any of the values listed above.

### Reduction of Precursor Consumption

[0120] Another approach to increasing 1,5-diaminopentane production in a microbial cell that is capable of such production is to decrease the activity of one or more enzymes that consume one or more 1,5-diaminopentane pathway precursors. In some embodiments, the activity of one or more such enzymes is reduced by modulating the expression or activity of the native enzyme(s). Illustrative enzymes of this type include homoserine dehydrogenase and cell wall biosynthesis pathway genes. The activity of such enzymes can be decreased, for example, by substituting the native promoter of the corresponding gene(s) with a less active or inactive promoter or by deleting the corresponding gene(s). See FIGS. 8 and 9 for examples of schemes for promoter replacement and targeted gene deletion, respectively, in S. cervisiae and Y. lipolytica.

[0121] In various embodiments, the engineering of a 1,5-diaminopentane-producing microbial cell to reduce precursor consumption by one or more side pathways increases the 1,5-diaminopentane titer by at least 10, 20, 30, 40, 50, 60, 70, 80, or 90 percent or by at least 2-fold, 2.5-fold, 3-fold, 3.5-fold, 4-fold, 4.5-fold, 5-fold, 5.5-fold, 6-fold, 6.5-fold, 7-fold, 7.5-fold, 8-fold, 8.5-fold, 9-fold, 9.5-fold, 10-fold, 11-fold, 12-fold, 13-fold, 14-fold, 15-fold, 16-fold, 17-fold, 18-fold, 19-fold, 20-fold, 21-fold, 22-fold, 23-fold, 24-fold, 25-fold, 30-fold, 35-fold, 40-fold, 45-fold, 50-fold, 55-fold, 60-fold, 65-fold, 70-fold, 75-fold, 80-fold, 85-fold, 90-fold, 95-fold, 100-fold, 150-fold, 200-fold, 250-fold, 300-fold, 350-fold, 400-fold, 450-fold, 500-fold, 550-fold, 600-fold, 650-fold, 700-fold, 750-fold, 800-fold, 850-fold, 900-fold, 950-fold, or 1000-fold. In various embodiments, the increase in 1,5-diaminopentane titer is in the range of 10-fold to 1000-fold, 20-fold to 500-fold, 50-fold to 400-fold, 10-fold to 300-fold, or any range bounded by any of the values listed above. These increases are determined relative to the 1,5-diaminopentane titer observed in a 1,5-diaminopentane-producing microbial cell that does not include genetic alterations to reduce precursor consumption. This reference cell may (but need not) have other genetic alterations aimed at increasing 1,5-diaminopentane production, i.e., the cell may have increased activity of an upstream pathway enzyme.

[0122] In various embodiments, the 1,5-diaminopentane titers achieved by reducing precursor consumption are at least 10, 20, 30, 40, 50, 75, 100, 200, 300, 400, 500, 600, 700, 800, or 900 mg/L or at least 1, 1.5, 2, 2.5, 3, 3.5, 4, 4.5, 5, 10, 15, 20, 25, 30, 35, 40, 45, 50, 55, 60, 65, 70, 75, 80, 85, 90, 95, 100, 110, 120, 130, 140, or 150 gm/L. In various embodiments, the titer is in the range of 10 mg/L to 150 gm/L, 20 mg/L to 140 gm/L, 50 mg/L to 130 gm/L, 100 mg/L to 120 gm/L, 500 mg/L to 110 gm/L or any range bounded by any of the values listed above.

[0123] Any of the approaches for increasing 1,5-diaminopentane production described above can be combined, in any combination, to achieve even higher 1,5-diaminopentane production levels.

### Expression of a 1,5-Diaminopentane Transporter

[0124] In some embodiments, it is advantageous to recover 1,5-diaminopentane from culture medium. To enhance transport of this compound from inside the engineered microbial cell to the culture medium, a 1,5-diaminopentane transporter that is active in the microbial cell being engineered may be introduced into the cell, typically by introducing and expressing the gene(s) encoding the enzyme(s)s using standard genetic engineering techniques. Suitable 1,5-diaminopentane transporters may be derived from any available source including for example, Escherichia coli.

### Illustrative Amino Acid and Nucleotide Sequences

[0125] The following table identifies amino acid and nucleotide sequences used in Example 1. The corresponding sequences are shown in the Sequence Listing.

[0126] SEQ ID NO Cross-Reference Table

| | Specified | | | | | AA SEQ | DNA SEQ | Contained in | |
|---|---|---|---|---|---|---|---|---|---|
| UniProt_ID | CodonOpt | CodonOpt | Published Enzyme Name | GO MF name | Source-Organism | ID NO: | ID NO: | Strain(s) | Tested In |
| A0A0A1U6Y7 | CG | 22000202167 | BiodegRadative arginine | lysine decarboxylase | Entamoeba invadens IP1 | 1 | 150 | CgCADAV_118 | Cg only |
| | | | decarboxylase, putative | activity | | | | | |
| A0A0U9HDH2 | YL | 22000483434 | Lysine decarboxylase | catalytic activity | Tepidanaerobacter syntrophicus | 2 | 151 | | |
| A0A0A1VRH6 | CG | 22000202167 | Lysine decarboxylase | lysine decarboxylase | Microcystis aeruginosa NIES-44 | 3 | 152 | | |
| | | | | activity | | | | | |
| Q81MS2 | CG | 22000202167 | Arginine decarboxylase | arginine decarboxylase | Bacillus anthracis | 4 | 153 | | |
| | | | | activity; lysine | | | | | |
| | | | | decarboxylase activity | | | | | |
| A0A1J4RBD5 | BS | 22000483450 | Lysine decarboxylase | catalytic activity | Salmonella enterica I | 5 | 154 | | |
| F4MZD9 | YL | 22000483434 | Lysine decarboxylase, | lysine decarboxylase | Yersinia enterocolitica W22703 | 6 | 155 | | |
| | | | constitutive | activity; ornithine | | | | | |
| | | | | decarboxylase activity | | | | | |
| D8GWH5 | CG | 22000202167 | Lysine decarboxylase | lysine decarboxylase | Bacillus cereus var. anthracis | 7 | 156 | CgCADAV_97 | Cg only |
| | | | | activity | (strain CI) | | | | |
| A0A1M7RI96 | YL | 22000483434 | Lysine decarboxylase | catalytic activity | Cryptosporangium aurantiacum | 8 | 157 | | |
| A0A1T4P6M4 | BS | 22000483450 | Lysine decarboxylase | catalytic activity | Garciella nitratireducens DSM | 9 | 158 | BsCADAV_01 | Bs only |
| | | | | | 15102 | | | | |
| G8SKC2 | CG | 22000202167 | Lysine decarboxylase | lysine decarboxylase | Actinoplanes sp. (strain ATCC | 10 | 159 | CgCADAV_98 | Cg only |
| | | | | activity | 31044/CBS 674.73/SE50/110) | | | | |
| P0A9H4 | BS | 22000483450 | Inducible lysine | lysine decarboxylase | Escherichia coli O157:H7 | 11 | 160 | | |
| | | | decarboxylase | activity | | | | | |
| B1XVH2 | BS | 22000483450 | Lysine decarboxylase | lysine decarboxylase | Polynucleobacter necessarius | 12 | 161 | BsCADAV_04 | Bs only |
| | | | | activity | subsp. necessarius (strain STIR1) | | | | |
| A0A1G9YTS7 | CG | 22000202167 | Lysine decarboxylase | catalytic activity | Sediminibacillus halophilus | 13 | 162 | | |
| A0A1T4QL79 | BS | 22000483450 | Lysine decarboxylase | catalytic activity | Carboxydocella sporoproducens | 14 | 163 | | |
| | | | | | DSM 16521 | | | | |
| R7FNV2 | YL | 22000483434 | Lysine decarboxylase | catalytic activity | Clostridium sp. CAG:288 | 15 | 164 | | |
| A0A0H3KNM1 | CG | 22000202167 | Lysine decarboxylase | lysine decarboxylase | Burkholderia multivorans (strain | 16 | 165 | | |
| | | | | activity | ATCC 17616/249) | | | | |
| E0NW26 | CG | 22000202167 | Orn/Lys/Arg | lysine decarboxylase | Selenomonas sp. oral taxon 149 | 17 | 166 | CgCADAV_132 | Cg only |
| | | | decarboxylase, major | activity | str. 67H29BP | | | | |
| | | | domain protein | | | | | | |
| F4MZD9 | BS | 22000483450 | Lysine decarboxylase, | lysine decarboxylase | Yersinia enterocolitica W22703 | 6 | 167 | BsCADAV_02 | Bs only |
| | | | constitutive | activity; ornithine | | | | | |
| | | | | decarboxylase activity | | | | | |
| A0A0H3B5Z1 | CG | 22000202167 | Lysine decarboxylase | lysine decarboxylase | Yersinia pseudotuberculosis | 18 | 168 | CgCADAV_99 | Cg only |
| | | | | activity | serotype O:3 (strain YPIII) | | | | |
| U5SA13 | YL | 22000483434 | Lysine decarboxylase | catalytic activity | Carnobacterium inhibens subsp. | 19 | 169 | | |
| | | | | | gilichinskyi | | | | |
| A0A1C6W736 | CG | 22000202167 | Lysine decarboxylase | lysine decarboxylase | Bacillus cytotoxicus | 20 | 170 | CgCADAV_120 | Cg only |
| | | | | activity | | | | | |
| W0HLJ4 | YL | 22000483434 | Lysine decarboxylase | lysine decarboxylase | Candidatus Sodalis pierantonius | 21 | 171 | | |
| | | | inducible | activity | str. SOPE | | | | |
| R6FYX1 | BS | 22000483450 | Arginine/lysine | catalytic activity | Clostridium sp. CAG:221 | 22 | 172 | BsCADAV_05 | Bs only |
| | | | decarboxylase | | | | | | |
| A0A1B4WVT4 | CG | 22000202167 | Lysine decarboxylase | lysine decarboxylase | Pseudomonas sp. LAB-08 | 23 | 173 | CgCADAV_100 | Cg only |
| | | | | activity | | | | | |
| W8X0P9 | YL | 22000483434 | Arginine decarboxylase | arginine decarboxylase | Castellaniella defragrans 65Phen | 24 | 174 | | |
| | | | Ornithine decarboxylase | activity; lysine | | | | | |
| | | | Lysine decarboxylase | decarboxylase activity; | | | | | |
| | | | | ornithine decarboxylase | | | | | |
| | | | | activity | | | | | |
| A0A1T4P6M4 | CG | 22000202167 | Lysine decarboxylase | catalytic activity | Garciella nitratireducens DSM | 9 | 175 | CgCADAV_77 | Cg only |
| | | | | | 15102 | | | | |
| A0A0A3ITC5 | CG | 22000202167 | Lysine decarboxylase | catalytic activity | Lysinibacillus odysseyi 34hs-1 = | 25 | 176 | CgCADAV_82 | Cg only |
| | | | | | NBRC 100172 | | | | |
| G8AE67 | CG | 22000202167 | Lysine/ornithine | lysine decarboxylase | Azospirillum brasilense Sp245 | 26 | 177 | CgCADAV_83 | Cg only |
| | | | decarboxylase | activity; ornithine | | | | | |
| | | | | decarboxylase activity | | | | | |
| D5AMW9 | CG | 22000202167 | Lysine/ornithine | lysine decarboxylase | Rhodobacter capsulatus (strain | 27 | 178 | CgCADAV_119 | Cg only |
| | | | decarboxylase | activity; ornithine | ATCC BAA-309/NBRC 16581/SB1003) | | | | |
| | | | | decarboxylase activity | | | | | |
| G7EXN9 | CG | 22000202167 | Lysine decarboxylase | lysine decarboxylase | Pseudoalteromonas sp. BSi20311 | 28 | 179 | CgCADAV_121 | Cg only |
| | | | | activity | | | | | |
| R6FYX1 | CG | 22000202167 | Arginine/lysine | catalytic activity | Clostridium sp. CAG:221 | 22 | 180 | CgCADAV_79 | Cg only |
| | | | decarboxylase | | | | | | |
| A0A245ZEH3 | CG | 22000202167 | Lysine/ornithine | lysine decarboxylase | Sphingomonas mucosissima | 29 | 181 | CgCADAV_100 | Cg only |
| | | | decarboxylase | activity; ornithine | | | | | |
| | | | | decarboxylase activity | | | | | |
| D7GUC4 | CG | 22000202167 | Arginine decarboxylase | arginine decarboxylase | butyrate-producing bacterium SS3/4 | 30 | 182 | CgCADAV_107 | Cg only |
| | | | | activity; lysine | | | | | |
| | | | | decarboxylase activity | | | | | |
| A0A1J0KV28 | CG | 22000202167 | Lysine decarboxylase, | lysine decarboxylase | Francisella sp. CA97-1460 | 31 | 183 | CgCADAV_97 | Cg only |
| | | | inducible | activity | | | | | |
| M8CMT6 | CG | 22000202167 | Arginine/lysine/ornithine | lysine decarboxylase | Thermoanaerobacter | 32 | 184 | CgCADAV_101 | Cg only |
| | | | decarboxylase | activity | thermohydrosulfuricus WC1 | | | | |
| A0A1D7W8T4 | YL | 22000483434 | Arginine decarboxylase | arginine decarboxylase | Brevibacterium linens | 33 | 185 | | |
| | | | | activity; lysine | | | | | |
| | | | | decarboxylase activity | | | | | |
| A0A011NX48 | YL | 22000483434 | Lysine decarboxylase LdcC | catalytic activity | Candidatus Accumulibacter sp. | 34 | 186 | | |
| | | | | | BA-94 | | | | |
| N4WSH8 | CG | 22000202167 | Lysine decarboxylase | catalytic activity | Gracilibacillus halophilus | 35 | 187 | CgCADAV_87 and | Cg & Sc |
| | | | | | YIM-C55.5 | | | ScCADAV_80 | |
| A0A240CR45 | CG | 22000202167 | Lysine decarboxylase LdcC | lysine decarboxylase | Eikenella corrodens | 36 | 188 | | |
| | | | | activity | | | | | |
| B6INL8 | CG | 22000202167 | Lysine | lysine decarboxylase | Rhodospirillum centenum (strain | 37 | 189 | | |
| | | | | activity; ornithine | ATCC 51521/SW) | | | | |
| | | | | decarboxylase activity | | | | | |
| A0A1M6PLW1 | CG | 22000202167 | Lysine decarboxylase | catalytic activity | Anaerobranca californiensis DSM | 38 | 190 | | |
| | | | | | 14826 | | | | |
| A0A150JTY7 | CG | 22000202167 | Arginine decarboxylase | arginine decarboxylase | Bacillus coagulans | 39 | 191 | CgCADAV_102 | Cg only |
| | | | | activity; lysine | | | | | |
| | | | | decarboxylase activity | | | | | |
| Q7NFN7 | BS | 22000483450 | Lysine decarboxylase | catalytic activity | Gloeobacter violaceus (strain | 40 | 192 | BsCADAV_03 | Bs only |
| | | | | | PCC 7421) | | | | |
| A0A1A8VMS3 | CG | 22000202167 | Lysine decarboxylase, | catalytic activity | Plasmodium malariae | 41 | 193 | | |
| | | | putative | | | | | | |
| A0A0A2BEA5 | CG | 22000202167 | Lysine decarboxylase | lysine decarboxylase | Prochlorococcus sp. MIT 0601 | 42 | 194 | CgCADAV_101 | Cg only |
| | | | | activity | | | | | |
| A0A011NX48 | CG | 22000202167 | Lysine decarboxylase LdcC | catalytic activity | Candidatus Accumulibacter sp. | 34 | 195 | CgCADAV_78 | Cg only |
| | | | | | BA-94 | | | | |
| D5D940 | CG | 22000202167 | Lysine decarboxylase | lysine decarboxylase | Bacillus megaterium (strain | 43 | 196 | CgCADAV_102 | Cg only |
| | | | | activity | DSM 319) | | | | |
| P52095 | YL | 22000483434 | Constitutive lysine | identical protein | Escherichia coli (strain K12) | 44 | 197 | | |
| | | | decarboxylase | binding; lysine | | | | | |
| | | | | decarboxylase activity | | | | | |
| D7DQC2 | CG | 22000202167 | Lysine decarboxylase | lysine decarboxylase | Methylotenera versatilis (strain | 45 | 198 | CgCADAV_115 | Cg only |
| | | | | activity | 301) | | | | |
| A0A060RT32 | CG | 22000202167 | Lysine decarboxylase, | lysine decarboxylase | Plasmodium reichenowi | 46 | 199 | | |
| | | | putative | activity | | | | | |
| E7SAJ9 | CG | 22000202167 | Orn/Lys/Arg | lysine decarboxylase | Streptococcus australis ATCC | 47 | 200 | CgCADAV_131 | Cg only |
| | | | decarboxylase, major | activity | 700641 | | | | |
| | | | domain protein | | | | | | |
| A0A081FVR4 | CG | 22000202167 | Arginine decarboxylase | arginine decarboxylase | Marinobacterium sp. AK27 | 48 | 201 | CgCADAV_83 | Cg only |
| | | | | activity; lysine | | | | | |
| | | | | decarboxylase activity; | | | | | |
| | | | | ornithine decarboxylase | | | | | |
| | | | | activity | | | | | |
| R7B1X0 | CG | 22000202167 | Lysine decarboxylase | catalytic activity | Bacteroides pectinophilus CAG:437 | 49 | 202 | CgCADAV_93 and | Cg & Sc |
| | | | | | | | | ScCADAV_85 | |
| B3PWQ0 | BS | 22000483450 | Probable lysine | lysine decarboxylase | Rhizobium etli (strain CIAT 652) | 50 | 203 | | |
| | | | decarboxylase protein | activity | | | | | |
| B9YZ77 | CG | 22000202167 | Lysine decarboxylase | lysine decarboxylase | Pseudogulbenkiania ferrooxidans | 51 | 204 | | |
| | | | | activity | 2002 | | | | |
| D4KTI3 | CG | 22000202167 | Arginine/lysine/ornithine | lysine decarboxylase | Roseburia intestinalis M50/1 | 52 | 205 | CgCADAV_105 | Cg only |
| | | | decarboxylases | activity | | | | | |
| D4KVB9 | CG | 22000202167 | Arginine decarboxylase | arginine decarboxylase | Roseburia intestinalis XB6B4 | 53 | 206 | CgCADAV_116 | Cg only |
| | | | | activity; lysine | | | | | |
| | | | | decarboxylase activity | | | | | |
| U5SA13 | BS | 22000483450 | Lysine decarboxylase | catalytic activity | Carnobacterium inhibens subsp. | 19 | 207 | | |
| | | | | | gilichinskyi | | | | |
| A0A1A8VN60 | CG | 22000202167 | Lysine decarboxylase, | catalytic activity | Plasmodium ovale curtisi | 54 | 208 | | |
| | | | putative | | | | | | |
| R6Y4K0 | YL | 22000483434 | Lysine decarboxylase | catalytic activity | Firmicutes bacterium CAG:345 | 55 | 209 | | |
| R6Y4K0 | BS | 22000483450 | Lysine decarboxylase | catalytic activity | Firmicutes bacterium CAG:345 | 55 | 210 | | |
| B5INA8 | CG | 22000202167 | Orn/Lys/Arg | lysine decarboxylase | Cyanobium sp. PCC 7001 | 56 | 211 | CgCADAV_100 | Cg only |
| | | | decarboxylases family 1 | activity | | | | | |
| A0A090NAB7 | CG | 22000202167 | Lysine decarboxylase | lysine decarboxylase | Shigella dysenteriae WRSd3 | 57 | 212 | CgCADAV_112 | Cg only |
| | | | | activity | | | | | |
| R7HED2 | BS | 22000483450 | Lysine decarboxylase | catalytic activity | Eubacterium sp. CAG:38 | 58 | 213 | BsCADAV_01 | Bs only |
| A0A0C4YL17 | CG | 22000202167 | Lysine decarboxylase | lysine decarboxylase | Cupriavidus basilensis | 59 | 214 | CgCADAV_113 | Cg only |
| | | | | activity | | | | | |
| R7FNV2 | CG | 22000202167 | Lysine decarboxylase | catalytic activity | Clostridium sp. CAG:288 | 15 | 215 | CgCADAV_79 | Cg only |
| A0A1T4QL79 | CG | 22000202167 | Lysine decarboxylase | catalytic activity | Carboxydocella sporoproducens DSM | 14 | 216 | | |
| | | | | | 16521 | | | | |
| G8AE67 | YL | 22000483434 | Lysine/ornithine | lysine decarboxylase | Azospirillum brasilense Sp245 | 26 | 217 | | |
| | | | decarboxylase | activity; ornithine | | | | | |
| | | | | decarboxylase activity | | | | | |
| A0A1J4RBD5 | CG | 22000202167 | Lysine decarboxylase | catalytic activity | Salmonella enterica I | 5 | 218 | CgCADAV_78 | Cg only |
| K2FIN6 | BS | 22000483450 | Lysine decarboxylase | catalytic activity | Salimicrobium jeotgali | 60 | 219 | | |
| A8GLC5 | CG | 22000202167 | Lysine decarboxylase | lysine decarboxylase | Serratia proteamaculans (strain | 61 | 220 | CgCADAV_99 | Cg only |
| | | | | activity | 568) | | | | |
| A0A1V0SRU9 | YL | 22000483434 | Lysine decarboxylase | catalytic activity | Sporosarcina ureae | 62 | 221 | | |
| A0A077YCW2 | CG | 22000202167 | Lysine decarboxylase, | lysine decarboxylase | Plasmodium berghei (strain Anka) | 63 | 222 | | |
| | | | putative | activity | | | | | |
| A0A1N6T1T8 | CG | 22000202167 | L-lysine decarboxylase | carboxy-lyase | Aeromonas veronii | 64 | 223 | CgCADAV_80 | Cg only |
| | | | | activity | | | | | |
| B9YZ77 | BS | 22000483450 | Lysine decarboxylase | lysine decarboxylase | Pseudogulbenkiania ferrooxidans | 51 | 224 | | |
| | | | | activity | 2002 | | | | |
| D8NR11 | CG | 22000202167 | Lysine decarboxylase | lysine decarboxylase | Ralstonia solanacearum CFBP2957 | 65 | 225 | CgCADAV_132 | Cg only |
| | | | | activity | | | | | |
| E8UEY5 | BS | 22000483450 | Arginine, Ornithine and | arginine decarboxylase | Taylorella equigenitalis (strain | 66 | 226 | | |
| | | | Lysine decarboxylase | activity; lysine | MCE9) | | | | |
| | | | | decarboxylase activity; | | | | | |
| | | | | ornithine decarboxylase | | | | | |
| | | | | activity | | | | | |
| A0A1M7RI96 | CG | 22000202167 | Lysine decarboxylase | catalytic activity | Cryptosporangium aurantiacum | 8 | 227 | CgCADAV_85 | Cg only |
| W0HLJ4 | BS | 22000483450 | Lysine decarboxylase | lysine decarboxylase | Candidatus Sodalis pierantonius | 21 | 228 | BsCADAV_04 | Bs only |
| | | | inducible | activity | str. SOPE | | | | |
| W0HLJ4 | CG | 22000202167 | Lysine decarboxylase | lysine decarboxylase | Candidatus Sodalis pierantonius | 21 | 229 | ScCADAV_76 | Sc only |
| | | | inducible | activity | str. SOPE | | | | |
| A0A101I516 | CG | 22000202167 | Arginine decarboxylase | catalytic activity | candidate division TA06 bacterium | 67 | 230 | CgCADAV_82 | Cg only |
| | | | Lysine decarboxylase | | 34_109 | | | | |
| | | | Ornithine decarboxylase | | | | | | |
| Q8I1X1 | CG | 22000202167 | Lysine decarboxylase, | lysine decarboxylase | Plasmodium falciparum (isolate | 68 | 231 | | |
| | | | putative | activity | 3D7) | | | | |
| B6JAY1 | CG | 22000202167 | Lysine/ornithine | lysine decarboxylase | Oligotropha carboxidovorans | 69 | 232 | CgCADAV_122 | Cg only |
| | | | decarboxylase Ldc | activity; ornithine | (strain ATCC 49405/DSM 1227/ | | | | |
| | | | | decarboxylase activity | KCTC 32145/OM5) | | | | |
| Q2JVN4 | CG | 22000202167 | Orn/Lys/Arg decarboxylase | catalytic activity | Synechococcus sp. (strain | 70 | 233 | CgCADAV_93 and | Cg & Sc |
| | | | | | JA-3-3Ab) (Cyanobacteria | | | ScCADAV_85 | |
| | | | | | bacterium Yellowstone A-Prime) | | | | |
| K4ZQR8 | CG | 22000202167 | Lysine decarboxylase | lysine decarboxylase | Paenibacillus alvei DSM 29 | 71 | 234 | CgCADAV_83 | Cg only |
| | | | YaaO | activity | | | | | |
| A0A1A9AX65 | CG | 22000202167 | Lysine decarboxylase, | lysine decarboxylase | Plesiomonas shigelloides | 72 | 235 | | |
| | | | inducible | activity | (Aeromonas shigelloides) | | | | |
| A0A011NX48 | BS | 22000483450 | Lysine decarboxylase LdcC | catalytic activity | Candidatus Accumulibacter sp. | 34 | 236 | | |
| | | | | | BA-94 | | | | |
| Q2JVN4 | BS | 22000483450 | Orn/Lys/Arg decarboxylase | catalytic activity | Synechococcus sp. (strain | 70 | 237 | BsCADAV_03 | Bs only |
| | | | | | JA-3-3Ab) (Cyanobacteria | | | | |
| | | | | | bacterium Yellowstone A-Prime) | | | | |
| A0A1M4T9I0 | BS | 22000483450 | Lysine decarboxylase | catalytic activity | Alkalibacter saccharofermentans | 73 | 238 | | |
| | | | | | DSM 14828 | | | | |
| B4SMN4 | CG | 22000202167 | Lysine decarboxylase | lysine decarboxylase | Stenotrophomonas maltophilia | 74 | 239 | CgCADAV_106 | Cg only |
| | | | | activity | (strain R551-3) | | | | |
| A0A1M6PK15 | YL | 22000483434 | Lysine decarboxylase | catalytic activity | Alicyclobacillus sp. USBA-503 | 75 | 240 | | |
| A0A1G4GTM1 | CG | 22000202167 | Lysine decarboxylase-like | lysine decarboxylase | Plasmodium vivax | 76 | 241 | CgCADAV_122 | Cg only |
| | | | protein, putative | activity | | | | | |
| N4WSH8 | YL | 22000483434 | Lysine decarboxylase | catalytic activity | Gracilibacillus halophilus | 35 | 242 | | |
| | | | | | YIM-C55.5 | | | | |
| K4ZQR8 | YL | 22000483434 | Lysine decarboxylase | lysine decarboxylase | Paenibacillus alvei DSM 29 | 71 | 243 | | |
| | | | YaaO | activity | | | | | |
| L8AGJ7 | CG | 22000202167 | Lysine decarboxylase | catalytic activity | Bacillus subtilis BEST7613 | 77 | 244 | CgCADAV_85 | Cg only |
| A0A1Y0Y9X9 | CG | 22000202167 | Lysine decarboxylase | lysine decarboxylase | Bacillus licheniformis | 78 | 245 | CgCADAV_111 | Cg only |
| | | | | activity | | | | | |
| A0A150LIS5 | YL | 22000483434 | Arginine decarboxylase | arginine decarboxylase | Anoxybacillus flavithermus | 79 | 246 | | |
| | | | | activity; lysine | | | | | |
| | | | | decarboxylase activity | | | | | |
| A0A1M4RP40 | CG | 22000202167 | Arginine decarboxylase/ | arginine decarboxylase | Staphylococcus aureus | 80 | 247 | CgCADAV_79 | Cg only |
| | | | Lysine decarboxylase | activity | | | | | |
| R7FNV2 | BS | 22000483450 | Lysine decarboxylase | catalytic activity | Clostridium sp. CAG:288 | 15 | 248 | BsCADAV_05 | Bs only |
| R6Y4K0 | CG | 22000202167 | Lysine decarboxylase | catalytic activity | Firmicutes bacterium CAG:345 | 55 | 249 | | |
| A0A1D7VZF2 | CG | 22000202167 | Arginine decarboxylase | arginine decarboxylase | Brevibacterium linens | 81 | 250 | CgCADAV_105 | Cg only |
| | | | | activity; lysine | | | | | |
| | | | | decarboxylase activity | | | | | |
| A8I481 | BS | 22000483450 | Lysine decarboxylase | catalytic activity | Chlamydomonas reinhardtii | 82 | 251 | | |
| | | | | | (Chlamydomonas smithii) | | | | |
| A0A1T4QL79 | YL | 22000483434 | Lysine decarboxylase | catalytic activity | Carboxydocella sporoproducens | 14 | 252 | | |
| | | | | | DSM 16521 | | | | |
| A0A150MS57 | CG | 22000202167 | Arginine decarboxylase | arginine decarboxylase | Geobacillus sp. B4113_201601 | 83 | 253 | CgCADAV_121 | Cg only |
| | | | | activity; lysine | | | | | |
| | | | | decarboxylase activity | | | | | |
| R7HED2 | CG | 22000202167 | Lysine decarboxylase | catalytic activity | Eubacterium sp. CAG:38 | 58 | 254 | CgCADAV_77 | Cg only |
| A0A1G9YTS7 | BS | 22000483450 | Lysine decarboxylase | catalytic activity | Sediminibacillus halophilus | 13 | 255 | | |
| A0A0A3ITC5 | BS | 22000483450 | Lysine decarboxylase | catalytic activity | Lysinibacillus odysseyi | 25 | 256 | | |
| | | | | | 34hs-1 = NBRC 100172 | | | | |
| L8AGJ7 | BS | 22000483450 | Lysine decarboxylase | catalytic activity | Bacillus subtilis BEST7613 | 77 | 257 | | |
| Q7NFN7 | YL | 22000483434 | Lysine decarboxylase | catalytic activity | Gloeobacter violaceus (strain | 40 | 258 | | |
| | | | | | PCC 7421) | | | | |
| E1RF59 | CG | 22000202167 | Lysine decarboxylase | lysine decarboxylase | Methanolacinia petrolearia | 84 | 259 | CgCADAV_106 | Cg only |
| | | | | activity | (strain DSM 11571/OCM 486/ | | | | |
| | | | | | SEBR 4847) ((Methanoplanus | | | | |
| | | | | | petrolearius) | | | | |
| U6L990 | CG | 22000202167 | Lysine decarboxylase, | catalytic activity | Eimeria brunetti | 85 | 260 | CgCADAV_87 and | Cg & Sc |
| | | | putative | | | | | ScCADAV_80 | |
| F4MZD9 | CG | 22000202167 | Lysine decarboxylase, | lysine decarboxylase | Yersinia enterocolitica W22703 | 6 | 261 | CgCADAV_88 and | Cg & Sc |
| | | | constitutive | activity; ornithine | | | | ScCADAV_81 | |
| | | | | decarboxylase activity | | | | | |
| B1XVH2 | YL | 22000483434 | Lysine decarboxylase | lysine decarboxylase | Polynucleobacter necessarius | 12 | 262 | | |
| | | | | activity | subsp. necessarius (strain | | | | |
| | | | | | STIR1) | | | | |
| A0A1C3KA53 | CG | 22000202167 | Lysine decarboxylase, | lysine decarboxylase | Plasmodium malariae | 86 | 263 | | |
| | | | putative | activity | | | | | |
| E9TK07 | CG | 22000202167 | Lysine decarboxylase, | lysine decarboxylase | Escherichia coli MS 117-3 | 87 | 264 | CgCADAV_107 | Cg only |
| | | | inducible | activity | | | | | |
| A0A081FVR4 | BS | 22000483450 | Arginine decarboxylase | arginine decarboxylase | Marinobacterium sp. AK27 | 48 | 265 | | |
| | | | | activity; lysine | | | | | |
| | | | | decarboxylase activity; | | | | | |
| | | | | ornithine decarboxylase | | | | | |
| | | | | activity | | | | | |
| A0A212LWY4 | CG | 22000202167 | Lysine/ornithine | lysine decarboxylase | uncultured Sporomusa sp. | 88 | 266 | CgCADAV_98 | Cg only |
| | | | decarboxylase | activity; ornithine | | | | | |
| | | | | decarboxylase activity | | | | | |
| A0A1A8VN60 | YL | 22000483434 | Lysine decarboxylase, | catalytic activity | Plasmodium ovale curtisi | 54 | 267 | | |
| | | | putative | | | | | | |
| A0A1M6CES8 | BS | 22000483450 | Lysine decarboxylase | catalytic activity | Dethiosulfatibacter aminovorans | 89 | 268 | | |
| | | | | | DSM 17477 | | | | |
| A0A0A2ARD9 | BS | 22000483450 | Lysine decarboxylase | lysine decarboxylase | Prochlorococcus marinus str. | 90 | 269 | BsCADAV_02 | Bs only |
| | | | | activity | MIT 9314 | | | | |
| A0A1M7RI96 | BS | 22000483450 | Lysine decarboxylase | catalytic activity | Cryptosporangium aurantiacum | 8 | 270 | | |
| B3KZY7 | CG | 22000202167 | Lysine decarboxylase, | lysine decarboxylase | Plasmodium knowlesi (strain H) | 91 | 271 | CgCADAV_108 | Cg only |
| | | | putative | activity | | | | | |
| V5AFU2 | YL | 22000483434 | Lysine decarboxylase, | lysine decarboxylase | Betaproteobacteria bacterium | 92 | 272 | | |
| | | | inducible | activity | MOLA814 | | | | |
| K2FIN6 | CG | 22000202167 | Lysine decarboxylase | catalytic activity | Salimicrobium jeotgali | 60 | 273 | | |
| A0A1N6T1T8 | BS | 22000483450 | L-lysine decarboxylase | carboxy-lyase activity | Aeromonas veronii | 64 | 274 | | |
| A0A0U9HDH2 | BS | 22000483450 | Lysine decarboxylase | catalytic activity | Tepidanaerobacter syntrophicus | 2 | 275 | | |
| A0A1J5S026 | CG | 22000202167 | Lysine/ornithine | lysine decarboxylase | mine drainage metagenome | 93 | 276 | | |
| | | | decarboxylase | activity; ornithine | | | | | |
| | | | | decarboxylase activity | | | | | |
| A0A1A9AX65 | YL | 22000483434 | Lysine decarboxylase, | lysine decarboxylase | Plesiomonas shigelloides | 72 | 277 | | |
| | | | inducible | activity | (Aeromonas shigelloides) | | | | |
| G8AE67 | BS | 22000483450 | Lysine/ornithine | lysine decarboxylase | Azospirillum brasilense Sp245 | 26 | 278 | | |
| | | | decarboxylase | activity; ornithine | | | | | |
| | | | | decarboxylase activity | | | | | |
| A0A031HSL8 | CG | 22000202167 | Lysine decarboxylase | lysine decarboxylase | Delftia sp. RIT313 | 94 | 279 | CgCADAV_116 and | Cg only |
| | | | | activity | | | | CgCADAV_131 | |
| A0A1M6PK15 | BS | 22000483450 | Lysine decarboxylase | catalytic activity | Alicyclobacillus sp. USBA-503 | 75 | 280 | BsCADAV_01 | Bs only |
| B0KMZ8 | CG | 22000202167 | Lysine decarboxylase | lysine decarboxylase | Pseudomonas putida (strain GB-1) | 95 | 281 | CgCADAV_97 | Cg only |
| | | | | activity | | | | | |
| A0A081FVR4 | YL | 22000483434 | Arginine decarboxylase | arginine decarboxylase | Marinobacterium sp. AK27 | 48 | 282 | | |
| | | | | activity; lysine | | | | | |
| | | | | decarboxylase activity; | | | | | |
| | | | | ornithine decarboxylase | | | | | |
| | | | | activity | | | | | |
| A0A191W896 | BS | 22000483450 | Lysine decarboxylase | catalytic activity | Vibrio anguillarum (Listonella | 96 | 283 | | |
| | | | | | anguillarum) | | | | |
| A0A191W896 | YL | 22000483434 | Lysine decarboxylase | catalytic activity | Vibrio anguillarum (Listonella | 96 | 284 | | |
| | | | | | anguillarum) | | | | |
| A0A1M6CES8 | CG | 22000202167 | Lysine decarboxylase | catalytic activity | Dethiosulfatibacter aminovorans | 89 | 285 | CgCADAV_80 | Cg only |
| | | | | | DSM 17477 | | | | |
| A0A0A2ARD9 | YL | 22000483434 | Lysine decarboxylase | lysine decarboxylase | Prochlorococcus marinus str. | 90 | 286 | | |
| | | | | activity | MIT 9314 | | | | |
| A0A0L0TNR8 | CG | 22000202167 | Arginine decarboxylase | arginine decarboxylase | Candidatus Burkholderia crenata | 97 | 287 | CgCADAV_107 | Cg only |
| | | | Ornithine decarboxylase | activity; lysine | | | | | |
| | | | Lysine decarboxylase | decarboxylase activity; | | | | | |
| | | | | ornithine decarboxylase | | | | | |
| | | | | activity | | | | | |
| A0A1R4HN10 | CG | 22000202167 | Arginine decarboxylase/ | arginine decarboxylase | Leucobacter sp. 7(1) | 98 | 288 | | |
| | | | Lysine decarboxylase | activity; lysine | | | | | |
| | | | | decarboxylase activity | | | | | |
| A0A0M2YBA0 | YL | 22000483434 | Lysine decarboxylase LdcC | lysine decarboxylase | Pantoea ananas (Erwinia uredovora) | 99 | 289 | | |
| | | | | activity | | | | | |
| A0A168T111 | CG | 22000202167 | Lysine decarboxylase | catalytic activity | Phormidium willei BDU 130791 | 100 | 290 | CgCADAV_89 | Cg only |
| X5JQV6 | CG | 22000202167 | Lysine decarboxylase | lysine decarboxylase | Richelia intracellularis | 101 | 291 | CgCADAV_111 | Cg only |
| | | | | activity | | | | | |
| A0A077LYA4 | CG | 22000202167 | Lysine decarboxylase | lysine decarboxylase | Tetrasphaera japonica T1-X7 | 102 | 292 | CgCADAV_112 | Cg only |
| | | | | activity | | | | | |
| A0A0A5GAB3 | YL | 22000483434 | Lysine decarboxylase | catalytic activity | Pontibacillus halophilus JSM | 103 | 293 | | |
| | | | | | 076056 = DSM 19796 | | | | |
| A0A089QSV4 | CG | 22000202167 | Lysine decarboxylase | lysine decarboxylase | Prochlorococcus sp. MIT 0801 | 104 | 294 | | |
| | | | | activity | | | | | |
| U6L990 | BS | 22000483450 | Lysine decarboxylase, | catalytic activity | Eimeria brunetti | 85 | 295 | | |
| | | | putative | | | | | | |
| F7S7C7 | CG | 22000202167 | Orn/DAP/Arg | lysine decarboxylase | Acidiphilium sp. PM | 105 | 296 | CgCADAV_112 | Cg only |
| | | | decarboxylase 2 | activity; ornithine | | | | | |
| | | | | decarboxylase activity | | | | | |
| B3PWQ0 | YL | 22000483434 | Probable lysine | lysine decarboxylase | Rhizobium etli (strain CIAT 652) | 50 | 297 | | |
| | | | decarboxylase protein | activity | | | | | |
| N1JS60 | CG | 22000202167 | Lysine decarboxylase | lysine decarboxylase | Mesotoga infera | 106 | 298 | CgCADAV_118 | Cg only |
| | | | | activity | | | | | |
| E8LF60 | CG | 22000202167 | Lysine/ornithine | lysine decarboxylase | Phascolarctobacterium | 107 | 299 | CgCADAV_113 | Cg only |
| | | | decarboxylase | activity; ornithine | succinatutens YIT 12067 | | | | |
| | | | | decarboxylase activity | | | | | |
| A0A086CIE7 | CG | 22000202167 | Arginine decarboxylase | lysine decarboxylase | Candidatus Atelocyanobacterium | 108 | 300 | CgCADAV_98 | Cg only |
| | | | | activity | thalassa isolate SIO64986 | | | | |
| D5X169 | CG | 22000202167 | Lysine decarboxylase | lysine decarboxylase | Thiomonas intermedia (strain K12) | 109 | 301 | CgCADAV_120 | Cg only |
| | | | | activity | (Thiobacillus intermedius) | | | | |
| B9YZ77 | YL | 22000483434 | Lysine decarboxylase | lysine decarboxylase | Pseudogulbenkiania ferrooxidans | 51 | 302 | | |
| | | | | activity | 2002 | | | | |
| Q7U7N7 | CG | 22000202167 | Orn/Lys/Arg | lysine decarboxylase | Synechococcus sp. (strain WH8102) | 110 | 303 | CgCADAV_111 | Cg only |
| | | | decarboxylases family 1 | activity | | | | | |
| A0A0N1FV26 | CG | 22000202167 | Lysine decarboxylase | lysine decarboxylase | Actinobacteria bacterium OV450 | 111 | 304 | CgCADAV_129 | Cg only |
| | | | | activity | | | | | |
| A0A1V0SRU9 | BS | 22000483450 | Lysine decarboxylase | catalytic activity | Sporosarcina ureae | 62 | 305 | | |
| Q7V108 | CG | 22000202167 | Orn/Lys/Arg | lysine decarboxylase | Prochlorococcus marinus subsp. | 112 | 306 | | |
| | | | decarboxylases family 1 | activity | pastoris (strain CCMP1986/NIES- | | | | |
| | | | | | 2087/MED4) | | | | |
| A0A089PLU5 | CG | 22000202167 | Lysine decarboxylase | lysine decarboxylase | Pluralibacter gergoviae | 113 | 307 | CgCADAV_115 | Cg only |
| | | | | activity | (Enterobacter gergoviae) | | | | |
| A0A097EQU8 | CG | 22000202167 | Lysine decarboxylase LdcC | lysine decarboxylase | Francisella sp. FSC1006 | 114 | 308 | CgCADAV_130 | Cg only |
| | | | | activity | | | | | |
| U5SA13 | CG | 22000202167 | Lysine decarboxylase | catalytic activity | Carnobacterium inhibens subsp. | 19 | 309 | CgCADAV_89 | Cg only |
| | | | | | gilichinskyi | | | | |
| A0A1L8CVK5 | BS | 22000483450 | Lysine decarboxylase | catalytic activity | Carboxydothermus pertinax | 115 | 310 | | |
| A0A1M6PLW1 | YL | 22000483434 | Lysine decarboxylase | catalytic activity | Anaerobranca californiensis | 38 | 311 | | |
| | | | | | DSM 14826 | | | | |
| N4WSH8 | BS | 22000483450 | Lysine decarboxylase | catalytic activity | Gracilibacillus halophilus | 35 | 312 | | |
| | | | | | YIM-C55.5 | | | | |
| P52095 | BS | 22000483450 | Constitutive lysine | identical protein | Escherichia coli (strain K12) | 44 | 313 | | |
| | | | decarboxylase | binding; lysine | | | | | |
| | | | | decarboxylase activity | | | | | |
| A0A1A9AX65 | BS | 22000483450 | Lysine decarboxylase, | lysine decarboxylase | Plesiomonas shigelloides | 72 | 314 | | |
| | | | inducible | activity | (Aeromonas shigelloides) | | | | |
| A0A1K1WST1 | BS | 22000483450 | Lysine decarboxylase | catalytic activity | Thermoactinomyces sp. DSM 45891 | 116 | 315 | | |
| A0A0A3ITC5 | YL | 22000483434 | Lysine decarboxylase | catalytic activity | Lysinibacillus odysseyi | 25 | 316 | | |
| | | | | | 34hs-1 = NBRC 100172 | | | | |
| F9EMG4 | CG | 22000202167 | Lysine decarboxylase | lysine decarboxylase | Fusobacterium nucleatum subsp. | 117 | 317 | CgCADAV_129 | Cg only |
| | | | | activity; metal ion | animalis ATCC 51191 | | | | |
| | | | | binding | | | | | |
| U6L990 | YL | 22000483434 | Lysine decarboxylase, | catalytic activity | Eimeria brunetti | 85 | 318 | | |
| | | | putative | | | | | | |
| U4KJM2 | CG | 22000202167 | Lysine decarboxylase | lysine decarboxylase | Acholeplasma palmae (strain | 118 | 319 | CgCADAV_105 | Cg only |
| | | | | activity | ATCC 49389/J233) | | | | |
| A0A1M6PK15 | CG | 22000202167 | Lysine decarboxylase | catalytic activity | Alicyclobacillus sp. USBA-503 | 75 | 320 | CgCADAV_77 | Cg only |
| A0A1M4T9I0 | CG | 22000202167 | Lysine decarboxylase | catalytic activity | Alkalibacter saccharofermentans | 73 | 321 | CgCADAV_80 | Cg only |
| | | | | | DSM 14828 | | | | |
| Q5L130 | BS | 22000483450 | Lysine decarboxylase | lysine decarboxylase | Geobacillus kaustophilus (strain | 119 | 322 | BsCADAV_04 | Bs only |
| | | | | activity | HTA426) | | | | |
| F6DKP2 | CG | 22000202167 | Lysine decarboxylase | lysine decarboxylase | Desulfotomaculum ruminis (strain | 120 | 323 | CgCADAV_119 | Cg only |
| | | | | activity | ATCC 23193/DSM 2154/NCIB 8452/DL) | | | | |
| A0A150LIS5 | BS | 22000483450 | Arginine decarboxylase | arginine decarboxylase | Anoxybacillus flavithermus | 79 | 324 | | |
| | | | | activity; lysine | | | | | |
| | | | | decarboxylase activity | | | | | |
| A0A1A8VMS3 | YL | 22000483434 | Lysine decarboxylase, | catalytic activity | Plasmodium malariae | 41 | 325 | | |
| | | | putative | | | | | | |
| K4ZQR8 | BS | 22000483450 | Lysine decarboxylase | lysine decarboxylase | Paenibacillus alvei DSM 29 | 71 | 326 | | |
| | | | YaaO | activity | | | | | |
| A0A0A1A968 | CG | 22000202167 | Arginine decarboxylase | arginine decarboxylase | Escherichia coli | 121 | 327 | CgCADAV_113 | Cg only |
| | | | | activity; lysine | | | | | |
| | | | | decarboxylase activity | | | | | |
| A0A1M6CES8 | YL | 22000483434 | Lysine decarboxylase | catalytic activity | Dethiosulfatibacter aminovorans | 89 | 328 | | |
| | | | | | DSM 17477 | | | | |
| A0A1J4RBD5 | YL | 22000483434 | Lysine decarboxylase | catalytic activity | Salmonella enterica I | 5 | 329 | | |
| A0A101I516 | YL | 22000483434 | Arginine decarboxylase | catalytic activity | candidate division TA06 bacterium | 67 | 330 | | |
| | | | Lysine decarboxylase | | 34_109 | | | | |
| | | | Ornithine decarboxylase | | | | | | |
| O50657 | CG | 22000202167 | Lysine/ornithine | lysine decarboxylase | Selenomonas ruminantium | 122 | 331 | | |
| | | | decarboxylase | activity; ornithine | | | | | |
| | | | | decarboxylase activity | | | | | |
| D2T5R1 | CG | 22000202167 | Lysine decarboxylase | lysine decarboxylase | Erwinia pyrifoliae (strain | 123 | 332 | CgCADAV_116 and | Cg only |
| | | | | activity | DSM 12163/CIP 106111/Ep16/96) | | | CgCADAV_117 | |
| Q0I358 | BS | 22000483450 | L-lysine decarboxylase | lysine decarboxylase | Haemophilus somnus (strain 129Pt) | 124 | 333 | | |
| | | | | activity | (Histophilus somni) | | | | |
| A0A1D3JIM6 | CG | 22000202167 | Lysine decarboxylase, | lysine decarboxylase | Plasmodium malariae | 125 | 334 | | |
| | | | putative | activity | | | | | |
| A0A1T4P6M4 | YL | 22000483434 | Lysine decarboxylase | catalytic activity | Garciella nitratireducens DSM | 9 | 335 | | |
| | | | | | 15102 | | | | |
| V5AFU2 | CG | 22000202167 | Lysine decarboxylase, | lysine decarboxylase | Betaproteobacteria bacterium | 92 | 336 | CgCADAV_91 | Cg only |
| | | | inducible | activity | MOLA814 | | | | |
| A0A1J1H057 | CG | 22000202167 | Lysine decarboxylase, | lysine decarboxylase | Plasmodium gallinaceum | 126 | 337 | CgCADAV_118 | Cg only |
| | | | putative | activity | | | | | |
| A0A1N6T1T8 | YL | 22000483434 | L-lysine decarboxylase | carboxy-lyase activity | Aeromonas veronii | 64 | 338 | | |
| A0A0A2BQI2 | CG | 22000202167 | Lysine decarboxylase | lysine decarboxylase | Prochlorococcus sp. MIT 0602 | 127 | 339 | CgCADAV_101 | Cg only |
| | | | | activity | | | | | |
| A0A1L8CVK5 | CG | 22000202167 | Lysine decarboxylase | catalytic activity | Carboxydothermus pertinax | 115 | 340 | CgCADAV_82 | Cg only |
| P0A9H4 | YL | 22000483434 | Inducible lysine | lysine decarboxylase | Escherichia coli O157:H7 | 11 | 341 | | |
| | | | decarboxylase | activity | | | | | |
| A0A0M2YBA0 | BS | 22000483450 | Lysine decarboxylase LdcC | lysine decarboxylase | Pantoea ananas (Erwinia uredovora) | 99 | 342 | | |
| | | | | activity | | | | | |
| O50657 | CG | 22000202167 | Lysine/ornithine | lysine decarboxylase | Selenomonas ruminantium | 128 | 343 | CgCADAV_119 | Cg only |
| | | | decarboxylase | activity; ornithine | | | | | |
| | | | | decarboxylase activity | | | | | |
| B1XVH2 | CG | 22000202167 | Lysine decarboxylase | lysine decarboxylase | Polynucleobacter necessarius | 12 | 344 | ScCADAV_76 | Sc only |
| | | | | activity | subsp. necessarius (strain STIR1) | | | | |
| A0A1M4RP40 | YL | 22000483434 | Arginine decarboxylase/ | arginine decarboxylase | Staphylococcus aureus | 80 | 345 | | |
| | | | Lysine decarboxylase | activity | | | | | |
| A0A224W715 | CG | 22000202167 | Arginine decarboxylase | arginine decarboxylase | Aquitalea magnusonii | 129 | 346 | CgCADAV_106 | Cg only |
| | | | | activity; lysine | | | | | |
| | | | | decarboxylase activity; | | | | | |
| | | | | ornithine decarboxylase | | | | | |
| | | | | activity | | | | | |
| Q0I358 | YL | 22000483434 | L-lysine decarboxylase | lysine decarboxylase | Haemophilus somnus (strain 129Pt) | 124 | 347 | | |
| | | | | activity | (Histophilus somni) | | | | |
| A0A0U9HDH2 | CG | 22000202167 | Lysine decarboxylase | catalytic activity | Tepidanaerobacter syntrophicus | 2 | 348 | | |
| I0QP51 | CG | 22000202167 | Lysine decarboxylase LdcC | lysine decarboxylase | Serratia sp. M24T3 | 130 | 349 | CgCADAV_120 | Cg only |
| | | | | activity | | | | | |
| D4JWF2 | CG | 22000202167 | Arginine decarboxylase | arginine decarboxylase | [Eubacterium] siraeum 70/3 | 131 | 350 | CgCADAV_117 | Cg only |
| | | | | activity; lysine | | | | | |
| | | | | decarboxylase activity | | | | | |
| R7B1X0 | YL | 22000483434 | Lysine decarboxylase | catalytic activity | Bacteroides pectinophilus CAG:437 | 49 | 351 | | |
| A0A0M2YBA0 | CG | 22000202167 | Lysine decarboxylase LdcC | lysine decarboxylase | Pantoea ananas (Erwinia uredovora) | 99 | 352 | CgCADAV_90 and | Cg & Sc |
| | | | | activity | | | | ScCADAV_83 | |
| D3RV51 | CG | 22000202167 | Lysine decarboxylase | lysine decarboxylase | Allochromatium vinosum (strain | 132 | 353 | CgCADAV_117 | Cg only |
| | | | | activity | ATCC 17899/DSM 180/NBRC 103801/ | | | | |
| | | | | | NCIMB 10441/D) (Chromatium vinosum) | | | | |
| A0A1D7W0C4 | CG | 22000202167 | Lysine decarboxylase | lysine decarboxylase | Brevibacterium linens | 133 | 354 | CgCADAV_108 | Cg only |
| | | | | activity | | | | | |
| A0A191W896 | CG | 22000202167 | Lysine decarboxylase | catalytic activity | Vibrio anguillarum (Listonella | 96 | 355 | CgCADAV_89 | Cg only |
| | | | | | anguillarum) | | | | |
| W8X0P9 | BS | 22000483450 | Arginine decarboxylase | arginine decarboxylase | Castellaniella defragrans 65Phen | 24 | 356 | BsCADAV_02 | Bs only |
| | | | Ornithine decarboxylase | activity; lysine | | | | | |
| | | | Lysine decarboxylase | decarboxylase activity; | | | | | |
| | | | | ornithine decarboxylase | | | | | |
| | | | | activity | | | | | |
| A0A1D7W8T4 | CG | 22000202167 | Arginine decarboxylase | arginine decarboxylase | Brevibacterium linens | 33 | 357 | CgCADAV_91 | Cg only |
| | | | | activity; lysine | | | | | |
| | | | | decarboxylase activity | | | | | |
| L8AGJ7 | YL | 22000483434 | Lysine decarboxylase | catalytic activity | Bacillus subtilis BEST7613 | 77 | 358 | | |
| R7B1X0 | BS | 22000483450 | Lysine decarboxylase | catalytic activity | Bacteroides pectinophilus CAG:437 | 49 | 359 | BsCADAV_03 | Bs only |
| A0A1M6PLW1 | BS | 22000483450 | Lysine decarboxylase | catalytic activity | Anaerobranca californiensis DSM | 38 | 360 | | |
| | | | | | 14826 | | | | |
| K2FIN6 | YL | 22000483434 | Lysine decarboxylase | catalytic activity | Salimicrobium jeotgali | 60 | 361 | | |
| A0A1A8VMS3 | BS | 22000483450 | Lysine decarboxylase, | catalytic activity | Plasmodium malariae | 41 | 362 | | |
| | | | putative | | | | | | |
| B8KH33 | CG | 22000202167 | Arginine/lysine/ornithine | lysine decarboxylase | gamma proteobacterium NOR5-3 | 134 | 363 | CgCADAV_130 | Cg only |
| | | | decarboxylase | activity | | | | | |
| A0A098FZR5 | CG | 22000202167 | Lysine decarboxylase, | lysine decarboxylase | Legionella fallonii LLAP-10 | 135 | 364 | CgCADAV_121 | Cg only |
| | | | constitutive | activity | | | | | |
| V5AFU2 | BS | 22000483450 | Lysine decarboxylase, | lysine decarboxylase | Betaproteobacteria bacterium | 92 | 365 | | |
| | | | inducible | activity | MOLA814 | | | | |
| A0A1G4H786 | CG | 22000202167 | Lysine decarboxylase, | lysine decarboxylase | Plasmodium vivax | 136 | 366 | | |
| | | | putative | activity | | | | | |
| E8UEY5 | YL | 22000483434 | Arginine, Ornithine and | arginine decarboxylase | Taylorella equigenitalis (strain | 66 | 367 | | |
| | | | Lysine decarboxylase | activity; lysine | MCE9) | | | | |
| | | | | decarboxylase activity; | | | | | |
| | | | | ornithine decarboxylase | | | | | |
| | | | | activity | | | | | |
| A0A067Z2D8 | CG | 22000202167 | Ornithine decarboxylase | lysine decarboxylase | Gluconobacter oxydans DSM 3504 | 137 | 368 | | |
| | | | Ldc | activity; ornithine | | | | | |
| | | | | decarboxylase activity | | | | | |
| A0A101I516 | BS | 22000483450 | Arginine decarboxylase | catalytic activity | candidate division TA06 bacterium | 67 | 369 | | |
| | | | Lysine decarboxylase | | 34_109 | | | | |
| | | | Ornithine decarboxylase | | | | | | |
| A6UJZ3 | CG | 22000202167 | Lysine decarboxylase | lysine decarboxylase | Sinorhizobium medicae (strain | 138 | 370 | CgCADAV_122 | Cg only |
| | | | | activity | WSM419) (Ensifer medicae) | | | | |
| P52095 | CG | 22000202167 | Constitutive lysine | identical protein | Escherichia coli (strain K12) | 44 | 371 | CgCADAV_92, | Cg only |
| | | | decarboxylase | binding; lysine | | | | CgCADAV_123, | |
| | | | | decarboxylase activity | | | | CgCADAV_124, | |
| | | | | | | | | CgCADAV_125, | |
| | | | | | | | | CgCADAV_126, | |
| | | | | | | | | CgCADAV_127 and | |
| | | | | | | | | CgCADAV_128 | |
| A0A1M4RP40 | BS | 22000483450 | Arginine decarboxylase/ | arginine decarboxylase | Staphylococcus aureus | 80 | 372 | BsCADAV_05 | Bs only |
| | | | Lysine decarboxylase | activity | | | | | |
| A0A1D7W8T4 | BS | 22000483450 | Arginine decarboxylase | arginine decarboxylase | Brevibacterium linens | 33 | 373 | | |
| | | | | activity; lysine | | | | | |
| | | | | decarboxylase activity | | | | | |
| W8X0P9 | CG | 22000202167 | Arginine decarboxylase | arginine decarboxylase | Castellaniella defragrans 65Phen | 24 | 374 | CgCADAV_88 and | Cg & Sc |
| | | | Ornithine decarboxylase | activity; lysine | | | | ScCADAV_81 | |
| | | | Lysine decarboxylase | decarboxylase activity; | | | | | |
| | | | | ornithine decarboxylase | | | | | |
| | | | | activity | | | | | |
| P0A9H4 | CG | 22000202167 | Inducible lysine | lysine decarboxylase | Escherichia coli O157:H7 | 11 | 375 | CgCADAV_92 and | Cg only |
| | | | decarboxylase | activity | | | | CgCADAV_73 | |
| A0A0A5GAB3 | BS | 22000483450 | Lysine decarboxylase | catalytic activity | Pontibacillus halophilus JSM | 103 | 376 | | |
| | | | | | 076056 = DSM 19796 | | | | |
| R7HED2 | YL | 22000483434 | Lysine decarboxylase | catalytic activity | Eubacterium sp. CAG:38 | 58 | 377 | | |
| R6FYX1 | YL | 22000483434 | Arginine/lysine | catalytic activity | Clostridium sp. CAG:221 | 22 | 378 | | |
| | | | decarboxylase | | | | | | |
| Q7NFN7 | CG | 22000202167 | Lysine decarboxylase | catalytic activity | Gloeobacter violaceus (strain | 40 | 379 | CgCADAV_93 and | Cg & Sc |
| | | | | | PCC 7421) | | | ScCADAV_85 | |
| A0A0A5GAB3 | CG | 22000202167 | Lysine decarboxylase | catalytic activity | Pontibacillus halophilus JSM | 103 | 380 | | |
| | | | | | 076056 = DSM 19796 | | | | |
| A0A1V0SRU9 | CG | 22000202167 | Lysine decarboxylase | catalytic activity | Sporosarcina ureae | 62 | 381 | CgCADAV_78 | Cg only |
| G8NRB8 | CG | 22000202167 | Lysine decarboxylase | lysine decarboxylase | Granulicella mallensis (strain | 139 | 382 | CgCADAV_129 | Cg only |
| | | | | activity | ATCC BAA-1857/DSM 23137/ | | | | |
| | | | | | MP5ACTX8) | | | | |
| B3PWQ0 | CG | 22000202167 | Probable lysine | lysine decarboxylase | Rhizobium etli (strain CIAT 652) | 50 | 383 | CgCADAV_90 and | Cg & Sc |
| | | | decarboxylase protein | activity | | | | ScCADAV_83 | |
| Q5L130 | YL | 22000483434 | Lysine decarboxylase | lysine decarboxylase | Geobacillus kaustophilus (strain | 119 | 384 | | |
| | | | | activity | HTA426) | | | | |
| Q0I358 | CG | 22000202167 | L-lysine decarboxylase | lysine decarboxylase | Haemophilus somnus (strain 129Pt) | 124 | 385 | | |
| | | | | activity | (Histophilus somni) | | | | |
| A0A1G9YTS7 | YL | 22000483434 | Lysine decarboxylase | catalytic activity | Sediminibacillus halophilus | 13 | 386 | | |
| A0A168T111 | YL | 22000483434 | Lysine decarboxylase | catalytic activity | Phormidium willei BDU 130791 | 100 | 387 | | |
| I2AZB6 | CG | 22000202167 | Lysine decarboxylase | lysine decarboxylase | Francisella noatunensis subsp. | 140 | 388 | CgCADAV_115 | Cg only |
| | | | | activity | orientalis (strain Toba 04) | | | | |
| A0A0A2ARD9 | CG | 22000202167 | Lysine decarboxylase | lysine decarboxylase | Prochlorococcus marinus str. | 90 | 389 | CgCADAV_88 and | Cg & Sc |
| | | | | activity | MIT 9314 | | | ScCADAV_81 | |
| A0A168T111 | BS | 22000483450 | Lysine decarboxylase | catalytic activity | Phormidium willei BDU 130791 | 100 | 390 | | |
| D1Y747 | CG | 22000202167 | Orn/Lys/Arg | lysine decarboxylase | Pyramidobacter piscolens W5455 | 141 | 391 | CgCADAV_130 | Cg only |
| | | | decarboxylase, major | activity | | | | | |
| | | | domain protein | | | | | | |
| A0A1A8VN60 | BS | 22000483450 | Lysine decarboxylase, | catalytic activity | Plasmodium ovale curtisi | 54 | 392 | | |
| | | | putative | | | | | | |
| A0A0U3TRI7 | CG | 22000202167 | Lysine decarboxylase, | lysine decarboxylase | Pseudomonas aeruginosa | 142 | 393 | CgCADAV_108 | Cg only |
| | | | constitutive | activity | | | | | |
| G0V456 | CG | 22000202167 | Arginine decarboxylase | arginine decarboxylase | Caloramator australicus RC3 | 143 | 394 | | |
| | | | Lysine decarboxylase | activity; lysine | | | | | |
| | | | Ornithine decarboxylase | decarboxylase activity; | | | | | |
| | | | | ornithine decarboxylase | | | | | |
| | | | | activity | | | | | |
| W8UMZ9 | CG | 22000202167 | Lysine decarboxylase | lysine decarboxylase | Klebsiella pneumoniae 30684/ | 144 | 395 | CgCADAV_131 | Cg only |
| | | | | activity | NJST258_2 | | | | |
| Q2JVN4 | YL | 22000483434 | Orn/Lys/Arg decarboxylase | catalytic activity | Synechococcus sp. (strain | 70 | 396 | | |
| | | | | | JA-3-3Ab) (Cyanobacteria | | | | |
| | | | | | bacterium Yellowstone A-Prime) | | | | |
| A0A150LIS5 | CG | 22000202167 | Arginine decarboxylase | arginine decarboxylase | Anoxybacillus flavithermus | 79 | 397 | CgCADAV_91 | Cg only |
| | | | | activity; lysine | | | | | |
| | | | | decarboxylase activity | | | | | |
| A0A011QHL8 | CG | 22000202167 | Lysine decarboxylase, | lysine decarboxylase | Candidatus Accumulibacter sp. | 145 | 398 | | |
| | | | constitutive | activity | BA-92 | | | | |
| Q5L130 | CG | 22000202167 | Lysine decarboxylase | lysine decarboxylase | Geobacillus kaustophilus (strain | 119 | 399 | ScCADAV_76 | Sc only |
| | | | | activity | HTA426) | | | | |
| A3CUZ9 | CG | 22000202167 | Lysine decarboxylase | lysine decarboxylase | Methanoculleus marisnigri (strain | 146 | 400 | CgCADAV_99 | Cg only |
| | | | | activity | ATCC 35101/DSM 1498/JR1) | | | | |
| A8I481 | YL | 22000483434 | Lysine decarboxylase | catalytic activity | Chlamydomonas reinhardtii | 82 | 401 | | |
| | | | | | (Chlamydomonas smithii) | | | | |
| A0A1M4T9I0 | YL | 22000483434 | Lysine decarboxylase | catalytic activity | Alkalibacter saccharofermentans | 73 | 402 | | |
| | | | | | DSM 14828 | | | | |
| A8I481 | CG | 22000202167 | Lysine decarboxylase | catalytic activity | Chlamydomonas reinhardtii | 82 | 403 | CgCADAV_87 and | Cg & Sc |
| | | | | | (Chlamydomonas smithii) | | | ScCADAV_80 | |
| A0A1L8CVK5 | YL | 22000483434 | Lysine decarboxylase | catalytic activity | Carboxydothermus pertinax | 115 | 404 | | |
| A0A1K1WST1 | YL | 22000483434 | Lysine decarboxylase | catalytic activity | Thermoactinomyces sp. DSM 45891 | 116 | 405 | | |
| A0A1K1WST1 | CG | 22000202167 | Lysine decarboxylase | catalytic activity | Thermoactinomyces sp. DSM 45891 | 116 | 406 | CgCADAV_85 | Cg only |
| Q9KV75 | CG | 22000202167 | Lysine decarboxylase, | lysine decarboxylase | Vibrio cholerae serotype O1 | 147 | 407 | CgCADAV_132 | Cg only |
| | | | inducible | activity | (strain ATCC 39315/El Tor Inaba | | | | |
| | | | | | N16961) | | | | |
| E8UEY5 | CG | 22000202167 | Arginine, Ornithine and | arginine decarboxylase | Taylorella equigenitalis | 66 | 408 | CgCADAV_90 and | Cg & Sc |
| | | | Lysine decarboxylase | activity; lysine | (strain MCE9) | | | ScCADAV_83 | |
| | | | | decarboxylase activity; | | | | | |
| | | | | ornithine decarboxylase | | | | | |
| | | | | activity | | | | | |
| P48570 | CG | 22000202167 | Homocitrate synthase, | homocitrate synthase | Saccharomyces cerevisiae (strain | 148 | 409 | CgCADAV_92 | Cg only |
| | | | cytosolic isozyme | activity | ATCC 204508/S288c) (Baker's yeast) | | | | |
| A0A0K3BNH0 | CG | 22000202167 | Arginine decarboxylase | arginine decarboxylase | Kibdelosporangium sp. MJ126-NF4 | 149 | 410 | CgCADAV_102 | Cg only |
| | | | | activity; lysine | | | | | |
| | | | | decarboxylase activity; | | | | | |
| | | | | ornithine decarboxylase | | | | | |
| | | | | activity | | | | | |

CG = codon-optimized for Corynebacterim glutamicum; codon-optimized for BS = Bacillus subtilus; codon-optimized for YL = Yarrowia lipolytica. The codon optimizations tested were based on the Kazusa codon usage tables tabulated for each host for gene codon optimization (www.kazusa.or.jp/codon/).

[0127] Microbial Host Cells

[0128] Any microbe that can be used to express introduced genes can be engineered for fermentative production of 1,5-diaminopentane as described above. In certain embodiments, the microbe is one that is naturally incapable of fermentative production of 1,5-diaminopentane. In some embodiments, the microbe is one that is readily cultured, such as, for example, a microbe known to be useful as a host cell in fermentative production of compounds of interest. Bacteria cells, including gram-positive or gram-negative bacteria can be engineered as described above. Examples include, in addition to C. glutamicum cells, Bacillus subtilus, B. licheniformis, B. lentus, B. brevis, B. stearothermophilus, B. alkalophilus, B. amyloliquefaciens, B. clausii, B. halodurans, B. megaterium, B. coagulans, B. circulans, B. lautus, B. thuringiensis, S. albus, S. lividans, S. coelicolor, S. griseus, Pseudomonas sp., P. alcaligenes, P. citrea, Lactobacilis spp. (such as L. lactis, L. plantarum), L. grayi, E. coli, E. faecium, E. gallinarum, E. casseliflavus, and/or E. faecalis cells.

[0129] There are numerous types of anaerobic cells that can be used as microbial host cells in the methods described herein. In some embodiments, the microbial cells are obligate anaerobic cells. Obligate anaerobes typically do not grow well, if at all, in conditions where oxygen is present. It is to be understood that a small amount of oxygen may be present, that is, there is some level of tolerance level that obligate anaerobes have for a low level of oxygen. Obligate anaerobes engineered as described above can be grown under substantially oxygen-free conditions, wherein the amount of oxygen present is not harmful to the growth, maintenance, and/or fermentation of the anaerobes.

[0130] Alternatively, the microbial host cells used in the methods described herein can be facultative anaerobic cells. Facultative anaerobes can generate cellular ATP by aerobic respiration (e.g., utilization of the TCA cycle) if oxygen is present. However, facultative anaerobes can also grow in the absence of oxygen. Facultative anaerobes engineered as described above can be grown under substantially oxygen-free conditions, wherein the amount of oxygen present is not harmful to the growth, maintenance, and/or fermentation of the anaerobes, or can be alternatively grown in the presence of greater amounts of oxygen.

[0131] In some embodiments, the microbial host cells used in the methods described herein are filamentous fungal cells. (See, e.g., Berka & Barnett, Biotechnology Advances, (1989), 7(2):127-154). Examples include Trichoderma longibrachiatum, T viride, T koningii, T. harzianum, Penicillium sp., Humicola insolens, H. lanuginose, H. grisea, Chrysosporium sp., C. lucknowense, Gliocladium sp., Aspergillus sp. (such as A. oryzae, A. niger, A. sojae, A. japonicus, A. nidulans, or A. awamori), Fusarium sp. (such as F. roseum, F. graminum F. cerealis, F. oxysporuim, or F. venenatum), Neurospora sp. (such as N. crassa or Hypocrea sp.), Mucor sp. (such as M. miehei), Rhizopus sp., and Emericella sp. cells. In particular embodiments, the fungal cell engineered as described above is A. nidulans, A. awamori, A. oryzae, A. aculeatus, A. niger, A. japonicus, T reesei, T. viride, F. oxysporum, or F. solani. Illustrative plasmids or plasmid components for use with such hosts include those described in U.S. Patent Pub. No. 2011/0045563.

[0132] Yeasts can also be used as the microbial host cell in the methods described herein. Examples include: Saccharomyces sp., Schizosaccharomyces sp., Pichia sp., Hansenula polymorpha, Pichia stipites, Kluyveromyces marxianus, Kluyveromyces spp., Yarrowia lipolytica and Candida sp. In some embodiments, the Saccharomyces sp. is S. cerevisiae (See, e.g., Romanos et al., Yeast, (1992), 8(6):423-488). Illustrative plasmids or plasmid components for use with such hosts include those described in U.S. Pat. No. 7,659,097 and U.S. Patent Pub. No. 2011/0045563.

[0133] In some embodiments, the host cell can be an algal cell derived, e.g., from a green alga, red alga, a glaucophyte, a chlorarachniophyte, a euglenid, a chromista, or a dinoflagellate. (See, e.g., Saunders & Warmbrodt, “Gene Expression in Algae and Fungi, Including Yeast,” (1993), National Agricultural Library, Beltsville, Md.). Illustrative plasmids or plasmid components for use in algal cells include those described in U.S. Patent Pub. No. 2011/0045563.

[0134] In other embodiments, the host cell is a cyanobacterium, such as cyanobacterium classified into any of the following groups based on morphology: Chlorococcales, Pleurocapsales, Oscillatoriales, Nostocales, Synechosystic or Stigonematales (See, e.g., Lindberg et al., Metab. Eng., (2010) 12(1):70-79). Illustrative plasmids or plasmid components for use in cyanobacterial cells include those described in U.S. Patent Pub. Nos. 2010/0297749 and 2009/0282545 and in Intl. Pat. Pub. No. WO 2011/034863.

[0135] Genetic Engineering Methods

[0136] Microbial cells can be engineered for fermentative 1,5-diaminopentane production using conventional techniques of molecular biology (including recombinant techniques), microbiology, cell biology, and biochemistry, which are within the skill of the art. Such techniques are explained fully in the literature, see e.g., “Molecular Cloning: A Laboratory Manual,” fourth edition (Sambrook et al., 2012); “Oligonucleotide Synthesis” (M. J. Gait, ed., 1984); “Culture of Animal Cells: A Manual of Basic Technique and Specialized Applications” (R. I. Freshney, ed., 6th Edition, 2010); “Methods in Enzymology” (Academic Press, Inc.); “Current Protocols in Molecular Biology” (F. M. Ausubel et al., eds., 1987, and periodic updates); “PCR: The Polymerase Chain Reaction,” (Mullis et al., eds., 1994); Singleton et al., Dictionary of Microbiology and Molecular Biology 2nd ed., J. Wiley & Sons (New York, N.Y. 1994).

[0137] Vectors are polynucleotide vehicles used to introduce genetic material into a cell. Vectors useful in the methods described herein can be linear or circular. Vectors can integrate into a target genome of a host cell or replicate independently in a host cell. For many applications, integrating vectors that produced stable transformants are preferred. Vectors can include, for example, an origin of replication, a multiple cloning site (MCS), and/or a selectable marker. An expression vector typically includes an expression cassette containing regulatory elements that facilitate expression of a polynucleotide sequence (often a coding sequence) in a particular host cell. Vectors include, but are not limited to, integrating vectors, prokaryotic plasmids, episomes, viral vectors, cosmids, and artificial chromosomes.

[0138] Illustrative regulatory elements that may be used in expression cassettes include promoters, enhancers, internal ribosomal entry sites (IRES), and other expression control elements (e.g., transcription termination signals, such as polyadenylation signals and poly-U sequences). Such regulatory elements are described, for example, in Goeddel, Gene Expression Technology: Methods In Enzymology 185, Academic Press, San Diego, Calif. (1990).

[0139] In some embodiments, vectors may be used to introduce systems that can carry out genome editing, such as CRISPR systems. See U.S. Patent Pub. No. 2014/0068797, published 6 Mar. 2014; see also Jinek M., et al., “A programmable dual-RNA-guided DNA endonuclease in adaptive bacterial immunity,” Science 337:816-21, 2012). In Type II CRISPR-Cas9 systems, Cas9 is a site-directed endonuclease, namely an enzyme that is, or can be, directed to cleave a polynucleotide at a particular target sequence using two distinct endonuclease domains (HNH and RuvC/RNase H-like domains). Cas9 can be engineered to cleave DNA at any desired site because Cas9 is directed to its cleavage site by RNA. Cas9 is therefore also described as an “RNA-guided nuclease.” More specifically, Cas9 becomes associated with one or more RNA molecules, which guide Cas9 to a specific polynucleotide target based on hybridization of at least a portion of the RNA molecule(s) to a specific sequence in the target polynucleotide. Ran, F. A., et al., (“In vivo genome editing using Staphylococcus aureus Cas9,” Nature 520(7546):186-91, 2015, Apr. 9], including all extended data) present the crRNA/tracrRNA sequences and secondary structures of eight Type II CRISPR-Cas9 systems. Cas9-like synthetic proteins are also known in the art (see U.S. Published Patent Application No. 2014-0315985, published 23 Oct. 2014).

[0140] Example 1 describes illustrative integration approaches for introducing polynucleotides and other genetic alterations into the genomes of C. glutamicum, S. cerevisiae, and B. subtilis cells.

[0141] Vectors or other polynucleotides can be introduced into microbial cells by any of a variety of standard methods, such as transformation, conjugation, electroporation, nuclear microinjection, transduction, transfection (e.g., lipofection mediated or DEAE-Dextrin mediated transfection or transfection using a recombinant phage virus), incubation with calcium phosphate DNA precipitate, high velocity bombardment with DNA-coated microprojectiles, and protoplast fusion. Transformants can be selected by any method known in the art. Suitable methods for selecting transformants are described in U.S. Patent Pub. Nos. 2009/0203102, 2010/0048964, and 2010/0003716, and International Publication Nos. WO 2009/076676, WO 2010/003007, and WO 2009/132220.

[0142] Engineered Microbial Cells

[0143] The above-described methods can be used to produce engineered microbial cells that produce, and in certain embodiments, overproduce, 1,5-diaminopentane. Engineered microbial cells can have at least 1, 2, 3, 4, 5, 6, 7, 8, 9, 10, 20, 30, 40, 50, 60, 70, 80, 90, 100 or more genetic alterations, such as 30-100 alterations, as compared to a native microbial cell, such as any of the microbial host cells described herein. Engineered microbial cells described in the Example below have one, two, or three genetic alterations, but those of skill in the art can, following the guidance set forth herein, design microbial cells with additional alterations. In some embodiments, the engineered microbial cells have not more than 15, 14, 13, 12, 11, 10, 9, 8, 7, 6, 5, or 4 genetic alterations, as compared to a native microbial cell. In various embodiments, microbial cells engineered for 1,5-diaminopentane production can have a number of genetic alterations falling within the any of the following illustrative ranges: 1-10, 1-9, 1-8, 2-7, 2-6, 2-5, 2-4, 2-3, 3-7, 3-6, 3-5, 3-4, etc.

[0144] In some embodiments, an engineered microbial cell expresses at least one heterologous lysine decarboxylase, such as in the case of a microbial host cell that does not naturally produce 1,5-diaminopentane. In various embodiments, the microbial cell can include and express, for example: (1) a single heterologous lysine decarboxylase gene, (2) two or more heterologous lysine decarboxylase genes, which can be the same or different (in other words, multiple copies of the same heterologous lysine decarboxylase gene can be introduced or multiple, different heterologous lysine decarboxylase genes can be introduced), (3) a single heterologous lysine decarboxylase gene that is not native to the cell and one or more additional copies of an native lysine decarboxylase gene (if applicable), or (4) two or more non-native lysine decarboxylase genes, which can be the same or different, and one or more additional copies of an native lysine decarboxylase gene (if applicable).

[0145] This engineered host cell can include at least one additional genetic alteration that increases flux through the pathway leading to the production of lysine (the immediate precursor of 1,5-diaminopentane). As discussed above, this can be accomplished by one or more of the following: increasing the activity of upstream enzymes, increasing the NaDPH supply, reducing precursor consumption.

[0146] In addition, the engineered host cell can express a 1,6-diaminopentane transporter to enhance transport of this compound from inside the engineered microbial cell to the culture medium.

[0147] The engineered microbial cells can contain introduced genes that have a native nucleotide sequence or that differ from native. For example, the native nucleotide sequence can be codon-optimized for expression in a particular host cell. The amino acid sequences encoded by any of these introduced genes can be native or can differ from native. In various embodiments, the amino acid sequences have at least 60 percent, 70 percent, 75 percent, 80 percent, 85 percent, 90 percent, 95 percent or 100 percent amino acid sequence identity with a native amino acid sequence.

[0148] The approach described herein has been carried out in bacterial cells, namely C. glutamicum and B. subtilis (prokaryotes), and in fungal cells, namely the yeast S. cerevisiae (eukaryotes). (See Example 1.) Other microbial hosts of particular interest include Y. lypolytica.

[0149] Illustrative Engineered Bacterial Cells

[0150] In certain embodiments, the engineered bacterial (e.g., C. glutamicum) cell expresses one or more heterologous lysine decarboxylase(s) having at least 70 percent, 75 percent, 80 percent, 85 percent, 90 percent, 95 percent or 100 percent amino acid sequence identity with a lysine decarboxylase from Escherichia coli (strain K12), Escherichia coli O157:H7, Vibrio cholerae serotype 01 (strain ATCC39315/El Tor Inaba N16961), Escherichia coli MS 117-3, Candidatus Burkholderia crenata, and/or butyrate-producing bacterium SS3/4. In particular embodiments:

[0151] the Escherichia coli (strain K12) lysine decarboxylase includes SEQ ID NO:44;

[0152] the Escherichia coli O157:H7 lysine decarboxylase includes SEQ ID NO:11;

[0153] the Vibrio cholerae serotype 01 (strain ATCC39315/El Tor Inaba N16961) lysine decarboxylase includes SEQ ID NO:147;

[0154] the Escherichia coli MS 117-3 lysine decarboxylase includes SEQ ID NO:87;

[0155] the Candidatus Burkholderia crenata lysine decarboxylase includes SEQ ID NO:97; and

[0156] the butyrate-producing bacterium SS3/4 lysine decarboxylase includes SEQ ID NO:30. As noted above, a titer of about 5.5 gm/L was achieved in C. glutamicum by expressing lysine decarboxylases from each of Escherichia coli MS 117-3, Candidatus Burkholderia crenata, and butyrate-producing bacterium SS3/4. (CgCADAV_107, expressing SEQ ID NOs:87, 97, and 30; see Table 5). A titer of about 7.0 gm/L was achieved by additionally expressing a lysine decarboxylase from a mine drainage metagenome (SEQ ID NO:93), together with these enzymes.

[0157] In certain embodiments, the engineered bacterial (e.g., B. subtilis) cell expresses one or more heterologous lysine decarboxylase(s) having at least 70 percent, 75 percent, 80 percent, 85 percent, 90 percent, 95 percent or 100 percent amino acid sequence identity with a lysine decarboxylase from Clostridium CAG:221, Clostridium CAG:288, and/or Staphylococcus aureus. In particular embodiments:

[0158] the Clostridium CAG:221 lysine decarboxylase includes SEQ ID NO:22;

[0159] the Clostridium CAG:288 lysine decarboxylase includes SEQ ID NO:15; and

[0160] the Staphylococcus aureus lysine decarboxylase includes SEQ ID NO:80. As noted above, a titer of about 47 mg/L was achieved in B. subtilis by expressing lysine decarboxylases from each of Clostridium CAG:221, Clostridium CAG:288, and Staphylococcus aureus. (See FIG. 4.)

[0161] Illustrative Engineered Yeast Cells

[0162] In certain embodiments, the engineered yeast (e.g., S. cerevisiae) cell expresses a heterologous (e.g., non-native) lysine decarboxylase having at least 70 percent, 75 percent, 80 percent, 85 percent, 90 percent, 95 percent, or 100 percent amino acid sequence identity to a lysine decarboxylase from Yersinia enterocolitica W22703, Castellaniella detragans 65Phen, and/or Prochorococcus marinus str. IT 9314. In particular embodiments:

[0163] the Yersinia enterocolitica W22703 lysine decarboxylase includes SEQ ID NO:6;

[0164] the Castellaniella detragans 65Phen lysine decarboxylase includes SEQ ID NO:24; and

[0165] the Prochorococcus marinus str. IT 9314 includes SEQ ID NO:90. As noted above, a titer of about 5 mg/L was achieved in S. cerevisiae by expressing lysine decarboxylases from each of Yersinia enterocolitica W22703, Castellaniella detragans 65Phen, and/or Prochorococcus marinus str. IT 9314. (See FIG. 3.)

[0166] These may be the only genetic alterations of the engineered yeast cell, or the yeast cell can include one or more additional genetic alterations, as discussed more generally above.

[0167] Culturing of Engineered Microbial Cells

[0168] Any of the microbial cells described herein can be cultured, e.g., for maintenance, growth, and/or 1,5-diaminopentane production.

[0169] In some embodiments, the cultures are grown to an optical density at 600 nm of 10-500, such as an optical density of 50-150.

[0170] In various embodiments, the cultures include produced 1,5-diaminopentane at titers of at least 10, 25, 50, 75, 100, 200, 300, 400, 500, 600, 700, 800, or 900 μg/L, or at least 1, 10, 50, 75, 100, 200, 300, 400, 500, 600, 700, 800, or 900 mg/L or at least 1, 1.5, 2, 2.5, 3, 3.5, 4, 4.5, 5, 10, 20, 50 g/L. In various embodiments, the titer is in the range of 10 μg/L to 10 g/L, 25 μg/L to 20 g/L, 100 μg/L to 10 g/L, 200 μg/L to 5 g/L, 500 μg/L to 4 g/L, 1 mg/L to 3 g/L, 500 mg/L to 2 g/L or any range bounded by any of the values listed above.

[0171] Culture Media

[0172] Microbial cells can be cultured in any suitable medium including, but not limited to, a minimal medium, i.e., one containing the minimum nutrients possible for cell growth. Minimal medium typically contains: (1) a carbon source for microbial growth; (2) salts, which may depend on the particular microbial cell and growing conditions; and (3) water. Suitable media can also include any combination of the following: a nitrogen source for growth and product formation, a sulfur source for growth, a phosphate source for growth, metal salts for growth, vitamins for growth, and other cofactors for growth.

[0173] Any suitable carbon source can be used to cultivate the host cells. The term “carbon source” refers to one or more carbon-containing compounds capable of being metabolized by a microbial cell. In various embodiments, the carbon source is a carbohydrate (such as a monosaccharide, a disaccharide, an oligosaccharide, or a polysaccharide), or an invert sugar (e.g., enzymatically treated sucrose syrup). Illustrative monosaccharides include glucose (dextrose), fructose (levulose), and galactose; illustrative oligosaccharides include dextran or glucan, and illustrative polysaccharides include starch and cellulose. Suitable sugars include C6 sugars (e.g., fructose, mannose, galactose, or glucose) and C5 sugars (e.g., xylose or arabinose). Other, less expensive carbon sources include sugar cane juice, beet juice, sorghum juice, and the like, any of which may, but need not be, fully or partially deionized.

[0174] The salts in a culture medium generally provide essential elements, such as magnesium, nitrogen, phosphorus, and sulfur to allow the cells to synthesize proteins and nucleic acids.

[0175] Minimal medium can be supplemented with one or more selective agents, such as antibiotics.

[0176] To produce 1,5-diaminopentane, the culture medium can include, and/or is supplemented during culture with, glucose and/or a nitrogen source such as urea, an ammonium salt, ammonia, or any combination thereof.

[0177] Culture Conditions

[0178] Materials and methods suitable for the maintenance and growth of microbial cells are well known in the art. See, for example, U.S. Pub. Nos. 2009/0203102, 2010/0003716, and 2010/0048964, and International Pub. Nos. WO 2004/033646, WO 2009/076676, WO 2009/132220, and WO 2010/003007, Manual of Methods for General Bacteriology Gerhardt et al., eds), American Society for Microbiology, Washington, D.C. (1994) or Brock in Biotechnology: A Textbook of Industrial Microbiology, Second Edition (1989) Sinauer Associates, Inc., Sunderland, Mass.

[0179] In general, cells are grown and maintained at an appropriate temperature, gas mixture, and pH (such as about 20° C. to about 37° C., about 6% to about 84% CO₂, and a pH between about 5 to about 9). In some aspects, cells are grown at 35° C. In certain embodiments, such as where thermophilic bacteria are used as the host cells, higher temperatures (e.g., 50° C.-75° C.) may be used. In some aspects, the pH ranges for fermentation are between about pH 5.0 to about pH 9.0 (such as about pH 6.0 to about pH 8.0 or about 6.5 to about 7.0). Cells can be grown under aerobic, anoxic, or anaerobic conditions based on the requirements of the particular cell.

[0180] Standard culture conditions and modes of fermentation, such as batch, fed-batch, or continuous fermentation that can be used are described in U.S. Publ. Nos. 2009/0203102, 2010/0003716, and 2010/0048964, and International Pub. Nos. WO 2009/076676, WO 2009/132220, and WO 2010/003007. Batch and Fed-Batch fermentations are common and well known in the art, and examples can be found in Brock, Biotechnology: A Textbook of Industrial Microbiology, Second Edition (1989) Sinauer Associates, Inc.

[0181] In some embodiments, the cells are cultured under limited sugar (e.g., glucose) conditions. In various embodiments, the amount of sugar that is added is less than or about 105% (such as about 100%, 90%, 80%, 70%, 60%, 50%, 40%, 30%, 20%, or 10%) of the amount of sugar that can be consumed by the cells. In particular embodiments, the amount of sugar that is added to the culture medium is approximately the same as the amount of sugar that is consumed by the cells during a specific period of time. In some embodiments, the rate of cell growth is controlled by limiting the amount of added sugar such that the cells grow at the rate that can be supported by the amount of sugar in the cell medium. In some embodiments, sugar does not accumulate during the time the cells are cultured. In various embodiments, the cells are cultured under limited sugar conditions for times greater than or about 1, 2, 3, 5, 10, 15, 20, 25, 30, 35, 40, 50, 60, or 70 hours or even up to about 5-10 days. In various embodiments, the cells are cultured under limited sugar conditions for greater than or about 5, 10, 15, 20, 25, 30, 35, 40, 50, 60, 70, 80, 90, 95, or 100% of the total length of time the cells are cultured. While not intending to be bound by any particular theory, it is believed that limited sugar conditions can allow more favorable regulation of the cells.

[0182] In some aspects, the cells are grown in batch culture. The cells can also be grown in fed-batch culture or in continuous culture. Additionally, the cells can be cultured in minimal medium, including, but not limited to, any of the minimal media described above. The minimal medium can be further supplemented with 1.0% (w/v) glucose (or any other six-carbon sugar) or less. Specifically, the minimal medium can be supplemented with 1% (w/v), 0.9% (w/v), 0.8% (w/v), 0.7% (w/v), 0.6% (w/v), 0.5% (w/v), 0.4% (w/v), 0.3% (w/v), 0.2% (w/v), or 0.1% (w/v) glucose. In some cultures, significantly higher levels of sugar (e.g., glucose) are used, e.g., at least 10% (w/v), 20% (w/v), 30% (w/v), 40% (w/v), 50% (w/v), 60% (w/v), 70% (w/v), or up to the solubility limit for the sugar in the medium. In some embodiments, the sugar levels falls within a range of any two of the above values, e.g.: 0.1-10% (w/v), 1.0-20% (w/v), 10-70% (w/v), 20-60% (w/v), or 30-50% (w/v). Furthermore, different sugar levels can be used for different phases of culturing. For fed-batch culture (e.g., of S. cerevisiae or C. glutamicum), the sugar level can be about 100-200 g/L (10-20% (w/v)) in the batch phase and then up to about 500-700 g/L (50-70% in the feed).

[0183] Additionally, the minimal medium can be supplemented 0.1% (w/v) or less yeast extract. Specifically, the minimal medium can be supplemented with 0.1% (w/v), 0.09% (w/v), 0.08% (w/v), 0.07% (w/v), 0.06% (w/v), 0.05% (w/v), 0.04% (w/v), 0.03% (w/v), 0.02% (w/v), or 0.01% (w/v) yeast extract. Alternatively, the minimal medium can be supplemented with 1% (w/v), 0.9% (w/v), 0.8% (w/v), 0.7% (w/v), 0.6% (w/v), 0.5% (w/v), 0.4% (w/v), 0.3% (w/v), 0.2% (w/v), or 0.1% (w/v) glucose and with 0.1% (w/v), 0.09% (w/v), 0.08% (w/v), 0.07% (w/v), 0.06% (w/v), 0.05% (w/v), 0.04% (w/v), 0.03% (w/v), or 0.02% (w/v) yeast extract. In some cultures, significantly higher levels of yeast extract can be used, e.g., at least 1.5% (w/v), 2.0% (w/v), 2.5% (w/v), or 3% (w/v). In some cultures (e.g., of S. cerevisiae or C. glutamicum), the yeast extract level falls within a range of any two of the above values, e.g.: 0.5-3.0% (w/v), 1.0-2.5% (w/v), or 1.5-2.0% (w/v).

[0184] Illustrative materials and methods suitable for the maintenance and growth of the engineered microbial cells described herein can be found below in Example 1.

[0185] 1,5-Diaminopentane Production and Recovery

[0186] Any of the methods described herein may further include a step of recovering 1,5-diaminopentane. In some embodiments, the produced 1,5-diaminopentane contained in a so-called harvest stream is recovered/harvested from the production vessel. The harvest stream may include, for instance, cell-free or cell-containing aqueous solution coming from the production vessel, which contains 1,5-diaminopentane as a result of the conversion of production substrate by the resting cells in the production vessel. Cells still present in the harvest stream may be separated from the 1,5-diaminopentane by any operations known in the art, such as for instance filtration, centrifugation, decantation, membrane crossflow ultrafiltration or microfiltration, tangential flow ultrafiltration or microfiltration or dead-end filtration. After this cell separation operation, the harvest stream is essentially free of cells.

[0187] Further steps of separation and/or purification of the produced 1,5-diaminopentane from other components contained in the harvest stream, i.e., so-called downstream processing steps may optionally be carried out. These steps may include any means known to a skilled person, such as, for instance, concentration, extraction, crystallization, precipitation, adsorption, ion exchange, and/or chromatography. Any of these procedures can be used alone or in combination to purify 1,5-diaminopentane. Further purification steps can include one or more of, e.g., concentration, crystallization, precipitation, washing and drying, treatment with activated carbon, ion exchange, nanofiltration, and/or re-crystallization. The design of a suitable purification protocol may depend on the cells, the culture medium, the size of the culture, the production vessel, etc. and is within the level of skill in the art.

[0188] The following examples are given for the purpose of illustrating various embodiments of the disclosure and are not meant to limit the present disclosure in any fashion. Changes therein and other uses which are encompassed within the spirit of the disclosure, as defined by the scope of the claims, will be identifiable to those skilled in the art.

### Example 1—Construction and Selection of Strains of Corynebacteria glutamicum, Saccharomyces Cerevisiae, and Bacillus subtilis Engineered to Produce 1,5-Diaminopentane

[0189] Plasmid/DNA Design

[0190] All strains tested for this work were transformed with plasmid DNA designed using proprietary software. Plasmid designs were specific to each of the host organisms engineered in this work. The plasmid DNA was physically constructed by a standard DNA assembly method. This plasmid DNA was then used to integrate metabolic pathway inserts by one of two host-specific methods, each described below.

[0191] C. glutamicum and B. subtilis Pathway Integration

[0192] A “loop-in, single-crossover” genomic integration strategy has been developed to engineer C. glutamicum and B. subtilis strains. FIG. 10 illustrates genomic integration of loop-in only and loop-in/loop-out constructs and verification of correct integration via colony PCR. Loop-in only constructs (shown under the heading “Loop-in”) contained a single 2-kb homology arm (denoted as “integration locus”), a positive selection marker (denoted as “Marker”)), and gene(s) of interest (denoted as “promoter-gene-terminator”). A single crossover event integrated the plasmid into the C. glutamicum or B. subtilis chromosome. Integration events are stably maintained in the genome by growth in the presence of antibiotic (25 μg/mlkanamycin). Correct genomic integration in colonies derived from loop-in integration were confirmed by colony PCR with UF/IR and DR/IF PCR primers.

[0193] Loop-in, loop-out constructs (shown under the heading “Loop-in, loop-out) contained two 2-kb homology arms (5′ and 3′ arms), gene(s) of interest (arrows), a positive selection marker (denoted “Marker”), and a counter-selection marker. Similar to “loop-in” only constructs, a single crossover event integrated the plasmid into the chromosome. Note: only one of two possible integrations is shown here. Correct genomic integration was confirmed by colony PCR and counter-selection was applied so that the plasmid backbone and counter-selection marker could be excised. This results in one of two possibilities: reversion to wild-type (lower left box) or the desired pathway integration (lower right box). Again, correct genomic loop-out is confirmed by colony PCR. (Abbreviations: Primers: UF=upstream forward, DR=downstream reverse, IR=internal reverse, IF=internal forward.)

[0194] S. cerevisiae Pathway Integration

[0195] A “split-marker, double-crossover” genomic integration strategy has been developed to engineer S. cerevisiae strains. FIG. 7 illustrates genomic integration of complementary, split-marker plasmids and verification of correct genomic integration via colony PCR in S. cerevisiae. Two plasmids with complementary 5′ and 3′ homology arms and overlapping halves of a URA3 selectable marker (direct repeats shown by the hashed bars) were digested with meganucleases and transformed as linear fragments. A triple-crossover event integrated the desired heterologous genes into the targeted locus and re-constituted the full URA3 gene. Colonies derived from this integration event were assayed using two 3-primer reactions to confirm both the 5′ and 3′ junctions (UF/IF/wt-R and DR/IF/wt-F). For strains in which further engineering is desired, the strains can be plated on 5-FOA plates to select for the removal of URA3, leaving behind a small single copy of the original direct repeat. This genomic integration strategy can be used for gene knock-out, gene knock-in, and promoter titration in the same workflow.

[0196] Cell Culture

[0197] The workflow established for S. cerevisiae involved a hit-picking step that consolidated successfully built strains using an automated workflow that randomized strains across the plate. For each strain that was successfully built, up to four replicates were tested from distinct colonies to test colony-to-colony variation and other process variation. If fewer than four colonies were obtained, the existing colonies were replicated so that at least four wells were tested from each desired genotype.

[0198] The colonies were consolidated into 96-well plates with selective medium (SD-ura for S. cerevisiae) and cultivated for two days until saturation and then frozen with 16.6% glycerol at −80° C. for storage. The frozen glycerol stocks were then used to inoculate a seed stage in minimal media with a low level of amino acids to help with growth and recovery from freezing. The seed plates were grown at 30° C. for 1-2 days. The seed plates were then used to inoculate a main cultivation plate with minimal medium and grown for 48-88 hours. Plates were removed at the desired time points and tested for cell density (OD600), viability and glucose, supernatant samples stored for LC-MS analysis for product of interest.

[0199] Cell Density

[0200] Cell density was measured using a spectrophotometric assay detecting absorbance of each well at 600 nm. Robotics were used to transfer fixed amounts of culture from each cultivation plate into an assay plate, followed by mixing with 175 mM sodium phosphate (pH 7.0) to generate a 10-fold dilution. The assay plates were measured using a Tecan M1000 spectrophotometer and assay data uploaded to a LIMS database. A non-inoculated control was used to subtract background absorbance. Cell growth was monitored by inoculating multiple plates at each stage, and then sacrificing an entire plate at each time point.

[0201] To minimize settling of cells while handling large number of plates (which could result in a non-representative sample during measurement) each plate was shaken for 10-15 seconds before each read. Wide variations in cell density within a plate may also lead to absorbance measurements outside of the linear range of detection, resulting in underestimate of higher OD cultures. In general, the tested strains so far have not varied significantly enough for this be a concern.

[0202] Liquid-Solid Separation

[0203] To harvest extracellular samples for analysis by LC-MS, liquid and solid phases were separated via centrifugation. Cultivation plates were centrifuged at 2000 rpm for 4 minutes, and the supernatant was transferred to destination plates using robotics. 75 μL of supernatant was transferred to each plate, with one stored at 4° C., and the second stored at 80° C. for long-term storage.

[0204] First-Round Genetic Engineering Results in Corynebacteria glutamicum, Saccharomyces cerevisiae, and Bacillus subtilis

[0205] A library approach was taken to screen heterologous pathway enzymes to establish the 1,5-diaminopentane pathway. The lysine decarboxylases tested were codon-optimized as shown in the SEQ ID NO Cross-Reference Table above and expressed in Corynebacteria glutamicum, Saccharomyces cerevisiae, and Bacillus subtilis hosts.

[0206] First-round genetic engineering results are shown in FIGS. 2 (C. glutamicum), 3 (S. cerevisiae), and 4 (B. subtilis). In C. glutamicum, a 300 mg/L titer of 1,5-diaminopentane was achieved in a first round of engineering after integration of three lysine decarboxylases from Escherichia coli (strain K12), Escherichia coli O157:H7, and Vibrio cholerae serotype 01 (strain ATCC39315/El Tor Inaba N16961; SEQ ID NOs:44, 11, and 147, respectively). (See FIG. 2.)

[0207] In S. cerevisiae, a titer of 5 mg/L was achieved in a first round of engineering after integration of three lysine decarboxylases from Yersinia enterocolitica W22703, Castellaniella detragans 65Phen, and Prochorococcus marinus str. IT 9314 (; SEQ ID NOs:6, 24, and 90, respectively). (See FIG. 3.)

[0208] In B. subtilis, a titer of about 47 mg/L was achieved in a first round of engineering after integration of lysine decarboxylases from each of Clostridium CAG:221, Clostridium CAG:288, and Staphylococcus aureus (; SEQ ID NOs:22, 15, and 80, respectively). (See FIG. 4.)

[0209] Second-Round Genetic Engineering Results in Corynebacteria glutamicum

[0210] A second round of engineering was carried out in the C. glutamicum. A titer of about 5.5 gm/L was achieved after integration of lysine decarboxylases from each of Escherichia coli MS 117-3, Candidatus Burkholderia crenata, and butyrate-producing bacterium SS3/4 (SEQ ID NOs:87, 97, and 30, respectively). (See FIG. 5).

[0211] Third-Round Genetic Engineering Results in Corynebacteriaglutamicum

[0212] A second round of engineering was carried out in the C. glutamicum. A titer of about 7.0 gm/L was achieved after insertion of an additional lysine decarboxylase from a mine drainage metagenome (SEQ ID NO:93) into the best-producing strain from the second-round (CgCADAV_107, including SEQ ID NOs:87, 97, and 30). See CgCADAV_306 in FIG. 11).

### Example 2—Bioreactor Production Run of Corynebacteria glutamicum Engineered to Produce 1,5-diaminopentane

[0213] An engineered C. glutamicum strain (CgCADAV_107) expressing lysine decarboxylases from each of Escherichia coli MS 117-3, Candidatus Burkholderia crenata, and butyrate-producing bacterium SS3/4 (SEQ ID NOs:87, 97, and 30, respectively) was tested for 1,5-diaminopentane production in bioreactor production runs.

[0214] As indicated in FIG. 12, bioreactor production runs using CgCADAV_107 resulted in 1,5-diaminopentane titers of about 27 gm/L.

The application's sequence listing, which the Patent Office published only in electronic form, follows.

SEQUENCE LISTING (410 sequences)

SEQ ID NO: 1 - protein, 850 aa, Entamoeba invadens
MHPFPIKILITTSLDEEKPLPQSLQLIRDEVIRLGATPIITHNLHDAYEELKRTIEISAIFFDWDSEYQKCKDKLRKFLFPFTSQIFDHKVLVLPATEKDPFLQAKTPLMHLEEEGYTLIVPRSYPDAKISELQKVETHEELLKVMEKDQLKVVPSPLTAIRTFKSINRKILIFLYTERLFIERLPIQVLESIEAYFWKGEETPTFVAKRMVTQASEYIEDILPPFFKALVKYLNQGKYSWHSPGHMGGVAYLRSPPGKFFYDFYGENMLCSDLSCSVCELGSLLNHTGPIGEAEKYASKVFGSEFTYFVLNGTSTANKMVFQGTVPSGKVVVLDRNAHKSSMQAIMTGNYKPVYLSPVRNKYGIIGPIPFSEFSVKNVTQKASKMNFFNKGDIDDGVQLFVLTQCTYDGICYNVNKVLQSLTQLDAKNAMFDEAWFPYAHFHPFYASFHSMNKDFFDKFDENDESLFHGSSALQDTDEDEEVRRSMTPNSFKGTIYATQSTHKVLAALSQCSMVHVRNSTDPFKFDKFNTYFQANTTTSPQYSLIASLDMSSAIMDISGESILDDVLKEVISFRCAMARVKSEFKESGEGWFFNVWQPSDILSGKKNIYETNYWILPPSGPDAWHGFPNIGKNQYLLDPLKVNILTVDEDLDIEIPACVVCRFLAMNGIIMEKMGYYTMLSLFTVGSRRGKSATLITALTQFKKLYDTNTPLKYVFTQEKSLDSENVGLKDFCNMMNPEIKKMQEMENATFSGNLPEVACSPFVASNALISDEVEWVKVENLTGRVSALLCVNYPPGIPTIMPGEIFDQLHTDMMIALAHFEERWPGYEFEVHGLVKKNNNFFIPCLKE

SEQ ID NO: 2 - protein, 482 aa, Tepidanaerobacter syntrophicus
MEKQEINKFSKTPLIQALKEYEKKDSLRFHMPGHKGRCPKGVFCDIKENLFGWDVTEIPGLDDFAQPEGPIKEAQEKLSALYGADTSYFLVNGATSGIISMMAGALSEKDKILIPRTSHKSVLSGLILTGASAAYIMPERCEELGVYAQVEPCAITNKLIENPDIKAILVTNPVYQGFCPDIARVAEIAKERGTTLLADEAQGPHFGFSKKVPQSAGKFADAWVQSPHKMLTSLTQSAWLHIKGNRIDKERLEDFLHIVTTSSPSYILMASLDGTRELIEENGNSYIEKAVELAQKARYEINNSTVFYAPGQEILGKYGISSQDPLHLMVNVSCAGYTGYDIEKALREDFSIYAEYADLCNVYFLITFSNTLEDIKGLLAVLSHFKPLKNKVKPCFWIKDLPKVALEPKKAFKLPAKSVPFKDSAGSVSKRPLVPYPPGAPLVMPGEIIEKEHIEMINEILNSGGYCQGVTSEKFIQVVTDF

SEQ ID NO: 3 - protein, 479 aa, Microcystis aeruginosa
MPSPESAPLVSQLQKKVNSLDVPFYAPGHKQGEGIGEDLSNLLGKSVFKADLPELPDLDNLFAPTGVIKEAQILAAETFGADKSWFLVNGSSCGIIAAILATCGEGDKIILARNIHKSAISGLILSGARPIFINPEYNPTIDLNLNITPQSLENALKLHPDAKAVMVVSPTYQGVCCDLETIAQITNHYSIPLLVDEAHGAHFAFHPDLPPAALSLGADMAIQSTHKVLGALTQASMLHLKSDRISSEKVDRALQLVQTTSPSYLLLASLDSARKQMAMQGLDLLTKTLDLAATARKELNKIPNISVLDFPHSIPGCHWFDRTRLTVIVKDFGLTGYEIDDILREKYAVTAELPTLSQLTFIISIGNHREHINRLITAFQCLKSPSSTSLPPTPAPVTGNSTISPRKAFFAPTEIVSRKNALDRLSADVICPYPPGIPVLMPGELISQEVLDYLQTILDLGGTITGGSDDNFETFRVLK

SEQ ID NO: 4 - protein, 493 aa, Bacillus anthracis
MYRLSQYETPLFTALVEHSKRNPIQFHIPGHKKGQGMDPEFREFIGHNALAIDLINIAPLDDLHHPKGMIKEAQDLAAAAFGADHTFFSIQGTSGAIMTMVMSVCGPGDKILVPRNVHKSVMSAIIFSGAKPIFMHPEIDPKLGISHGITIQSVKKALEEHSDAKGLLVINPTYFGFAADLEQIVQLAHSYDIPVLVDEAHGVHIHFHDELPMSAMQAGADMAATSVHKLGGSLTQSSILNVKEGLVNVKHVQSIISMLTTTSTSYILLASLDVARKRLATEGKALIEQTIQLAEQVRNAINDIEHLYCPGKEMLGTDATFNYDPTKIIVSVKDLGITGHQAEVWLREQYNIEVELSDLYNILCLVTFGDTESETNTLIAALQDLSAIFKNKADKGVRIQVEIPEIPVLALSPRDAFYSETEVIPFENAAGRIIADFVMVYPPGIPIFTPGEIITQDNLEYIRKNLEAGLPVQGPEDMTLQTLRVIKEYKPIS

SEQ ID NO: 5 - protein, 461 aa, Salmonella enterica
MNAKVINMTRTTPVINKMQAMHDRNIFSFHALPVSSYGESDVVGDARNEILAYPESSATGELFDNFFFPSGVICESQKLTAGIYGSDSSFYITGGTSTANQISISALYDKGDRILVDRNCHQSVHFHVQSIGAETHYLCPDLRTEDGEICAWSYNHLEQTLLNLQRSGKACDIVILTAQSYEGIIYDIPGVLTRLLSAGVCTRRFFIDEAWGSMNYFSEDTQSLTAMNIEPLLDKYPDLDVVCTHSAHKSLFCLRQASIIHCRGTATLSERIETAKYRIHTTSPNYPIIASLDASQAMMASHGKKLANHARMLVRKFVAGVSSLKYFGEKAICQGIFSSHWHIYYDPTKVMLDVSSLGNGKDIKKLLCNENIYVKRFINNVLLFNFHIGINEQAVSSLLQALNSISQEIYKQDRSKAEVSSKFIIPYPPGVPLVFPGEIIDDEIRNKIHEYRKNGFLIIAA

SEQ ID NO: 6 - protein, 365 aa, Yersinia enterocolitica
MSGERMVGKVFYETQSTHKLLAAFSQASMIHIKGDYSESTFNEAYMMHTTTSPNYGIVASMETAAAMMRGNPGRRMILRSIERAMHFRKEVRRLRSESDNWFFDVWQPEDIDEIACWPLQPGQAWHGFSHADADHMYLDPIKVTILTPGMSHEGALEEEGIPAALVAKFLDERGIVVEKTGPYNLLFLFSIGIDKTKAMSLLRGLTDFKRAFDLNLRIKNMLPDLFAEDPDFYRHMRIQDLAAGIHNMIRQHDLPRLMRKSFDVLPEMKLTPYNMFQQQVRGNIVACDMADLVGKVVANMILPYPPGVPLVMPGEMITAESRAVLDFLLMLCAIGARYPGFETDIHGAKRDEHGRYWVNILDTKQ

SEQ ID NO: 7 - protein, 473 aa, Bacillus cereus
MNQNRIPLYEALIEFKERRPLSFHVPGHKNGLNFPKEVVEEFKDILSIDVTELSGLDDLHSPFECIDEAQQLLADVYGVNKSYFLINGSTVGNLAMILSCCGEHDIVLVQRNCHKSIINGLKLAGANPIFLDPWIDEAYNVPVGIHDEIIKEAIEKYPNAKALILTHPNYYGMGMDLEASIAYAHTHKIPVLVDEAHGAHFCLGGAFPQSALAYGADIVVHSAHKTLPAMTMGSYLHINSRLVKEEKVSTYLSMLQSSSPSYPIMASLDIARFTIARIKEKGHDEIVEFLQEFKEELSTIPQIAILQYPLQDGLKITVQTRCQLSGYELQSVFEKVGIYTEMADPYNVLFILPLQVNKKYMKAIEMIRVALQYYEVKDKMESIRYTYKGEFSPLPYTYKQLEEYETKVVPVEEAVGMVAAEMVIPYPPGIPLIMYGERITSEHKEQIMYLEKAGARFQGSTKYMKVYDIESRF

SEQ ID NO: 8 - protein, 515 aa, Cryptosporangium aurantiacum
MTAVALPSGDRPVLYDAAHGSAPLVDAIIRYRGCETGALHVPGHAGGRTVGPGLRNLLGSTFLASDVWLTPADATTARREAEALAAKAWGSDEALFLLDGSSGGNRAVHLAQQQNPGADHVVVARDSHTSTLAGLVLSGATPHWVTPRLDQGGFGISLGIDPISLDRALTDLAATGHRASLVSMVSPGYAGACSDVRALAAVAHRHDAPLFVDEAWGAHLPFHPDLPENAISAGADVAVTSAHKMLAAPSGAALILVRGERIDAGRIGRTVQMTQTTSPLLPVLASIDEARRTMVSRGRILLDRTLDLVADARRRLAAIPGVRVAEAEDLGVPRERFDPLRLVVSVRGLGLTGLALEKLLRTPGPGLGTSGLLHPAVAVEGSDESNLFVAITTCTSPDVVDALVTALRTLSCRPRRRLRPAWDGQLVAALLAPREQVCTPREAHFAATENIPLERAVGRTSAEPITPYPPGVPAVMPGERLDRDAVAALERAVSTGMHIHGAADPTLATVSVLRD

SEQ ID NO: 9 - protein, 474 aa, Garciella nitratireducens
MSLIEGLNKILQENLTRLHMPGHKGRKIFPEILKNNLQEIDITEIPGSDNLHHAQEILLEAQQRAAKVFGAQKTYFLINGTTVGIQAMILATCRPGDKLLVPRNCHRSVFSALILGDIIPVYLSPISHPKTGIDLSISVEEIEKKLKQHPDVKGAVLTYPTYYGSCSDIEKIAKILHHKKKFLLVDEAHGAHLALHKNLPLSALQAGADIVVDSTHKILSSFTQSAMLHIGNQYLSTEKVELFLGMLQSSSPSYLLMASLDWASQQAEEMGQIKWEKIIQWTHQAREDIRHHTNMKPIGNEIIGRYHVVDYDPSKLLIDVSSTGLTGIETEKILREKYRIQVELSDYYHILAMTGMGTIEQDIQRFTQAMIDIDHKYGNPHKKLTSLPIRIREGEMGLSPRKAIYAPSEKILLKNAQGRMSKEFIIPYPPGIPMVLPGEVITQEIIEEIEIMQRWGGTIIGLEDNTLQNIQVIK

SEQ ID NO: 10 - protein, 509 aa, Actinoplanes sp.
MTGRLESFGTLARWYMCGMKDRILDHACAPLLEALVDYHREDRYGFTPPGHRQGRGADPRARQILGASTYQADVLASAGLDDRSSSHQYLAEAEKLMADAVGADQSFFSTAGSSLSVKAAMLAVAGGRGQLLIGRDAHKSVVAGLIFSGVEPRWVDVRYDENLHLAHPPSPQQLEEAWNRHPTAAGALIVSPTPYGTCADIAGLAEVCHRRGKPLIVDEAWGAHLPFHDDLPTWALGAGADICVVSVHKMGAGFEQGSVLHSRGDLVDAKHLSACADLLMTTSPNAIVYAGLDGWRRQMVEHGHDLLSAAIRVAESVRDRIGRIAGLHVVREELISVEASHDLDPLQVVIDLTDLGISGYQAADWLRENCRIDMGLSDHRRILATLSMADDETTADRLIEALRRLVAAAPALPAAKPVHLPPPAAFEVDPVMLPRDAFFGPAETVPVAQATGRVCAEQITPYPPGIPALLPGERINAEILDYLRSGLAAGMVLPDSADPNLDTIRVAIT

SEQ ID NO: 11 - protein, 715 aa, Escherichia coli
MNVIAILNHMGVYFKEEPIRELHRALERLNFQIVYPNDRDDLLKLIENNARLCGVIFDWDKYNLELCEEISKMNENLPLYAFANTYSTLDVSLNDLRLQISFFEYALGAAEDIANKIKQTTDEYINTILPPLTKALFKYVREGKYTFCTPGHMGGTAFQKSPVGSLFYDFFGPNTMKSDISISVSELGSLLDHSGPHKEAEQYIARVFNADRSYMVTNGTSTANKIVGMYSAPAGSTILIDRNCHKSLTHLMMMSDVTPIYFRPTRNAYGILGGIPQSEFQHATIAKRVKETPNATWPVHAVITNSTYDGLLYNTDFIKKTLDVKSIHFDSAWVPYTNFSPIYEGKCGMSGGRVEGKVIYETQSTHKLLAAFSQASMIHVKGDVNEETFNEAYMMHTTTSPHYGIVASTETAAAMMKGNAGKRLINGSIERAIKFRKEIKRLRTESDGWFFDVWQPDHIDTTECWPLRSDSTWHGFKNIDNEHMYLDPIKVTLLTPGMEKDGTMSDFGIPASIVAKYLDEHGIVVEKTGPYNLLFLFSIGIDKTKALSLLRALTDFKRAFDLNLRVKNMLPSLYREDPEFYENMRIQELAQNIHKLIVHHNLPDLMYRAFEVLPTMVMTPYAAFQKELHGMTEEVYLDEMVGRINANMILPYPPGVPLVMPGEMITEESRPVLEFLQMLCEIGAHYPGFETDIHGAYRQADGRYTVKVLKEESKK

SEQ ID NO: 12 - protein, 755 aa, Polynucleobacter necessarius
MKFRFPIIIIDEDFRSENISGSGIRDLAEAIENEGVEVIGLTSYGDLTSFAQQASRASTFIVSIDDEEFDSDSEDHDLPALNNLRAFITEVRKRNEDIPIFLYGETRTSRHMPNDILRELHGFIHMNEDTPEFVARHIIREAKVYLDSLAPPFFRALTNYASEGSYSWHCPGHSGGVAFLKSPVGRMFHQFFGENMLRADVCNAVEELGQLLDHTGPVLQSERNAARIFNADHLFFVTNGTSTSNKIVWHSTVAPGDVVLVDRNCHKSVIHSITMMGAIPIFLMPTRNHLGIIGPIPKEEFEWKNIKKKIDVNPFIKDKNVVPRVMTLTQSTYDGIVYNVEMIKEMLDGKVDSLHFDEAWLPHAAFHPFYKDMHAIGSDRKRTKKSLMFATQSTHKLLAGLSQASQVLVQDAEDAKLDRDCFNEAYLMHTSTSPQYAIIASCDVSAAMMESPGGTTLVEESIAEAMDFRRAMREVDDKFGADWWFKVWGPDHLAEEGIGERSDWVLEPSAPWHDFGKLAKDFNMLDPIKATVVTPGLDIEGNFGSMGISASIVTKYLAEHGVIVEKCGLYSFFIMFTIGITKGRWNTLVTELQQFKDHFDKNAPLWKVLPEFVAKHPRYERVGLKDICQQIHEFYKSRDVARMTTEMYTSDMIPAMMPSEAWAKMAHKQVDRVPLDRLEGRVTAMLVTPYPPGIPLLIPGERFNKRIIDYLYFARDFNEKFPGFETDIHGLVKTSVDGKSEYYVDCVRQERDITL

SEQ ID NO: 13 - protein, 474 aa, Sediminibacillus halophilus
MNQDLTPLFGALQTFSQKNPISFHVPGHKNGKIFTDNGLEIFEKLLQIDVTELTGLDDLHVATGAIKQAQNLAASWFGADETFFLVGGSTTGNLAMMLTAARLGRKVLVQRNCHKSILNGLELSGAEPVFVAPAYDRRVGRYTAPTLDTIRQAIDQYPEIGAIVLTYPDYFGTVFDLPSVVELAHQRNIAVLVDEAHGVHFSLSEVFPASALELGADLVVQSAHKMAPALTMASYLHIKSHIIDRGDVAHYLQMLQSSSPSYPLMASLDLARYYLAGIKENELNPILESIARLREVFSSAEGWEVLPNEAGKDDPLKITLEVDKRWSGIQVAKLFEEQDIYPELSTENQVLFIHGLAPFQEWERLQTAVEKTSQRLKFLPNRDTIGSVQIEQQQIHSLEVSYQTMNRMRKEFIGWASAEGKIAAQAVIPYPPGIPVLLKGEKITSVHIKMINYLIKQGINFQNHNIEQGMYCLR

SEQ ID NO: 14 - protein, 469 aa, Carboxydocella sporoproducens
MAQLRAYGKIKIMNKQADCPIFDAINEYLAQKGDCWHMPGHGQGRAFQSLWPELAAVARWDVTEIPGLDSWHQPEGCIAAAEKLLAEAYQTQASFFLVEGASAGIWAMMAAVVSQNGNRIAIPRWAHASVFHALVLTGAEPVFYPPVFLPEWQLIIGPETEGVALDSDGIFFLYPSYEGVAWPLKDWMLANSYNTTAPVLVDEAHGALFPWHERMPVSAITSGCDGVVHGLHKTGPALTQTGYLHLPTAKLKADWVRKNLSLLTTTSPSYLFMAALDLARRELYFHGREKIEQMLEWAEQLRWELERIGIEVLKPEQLPAGYQLDRTRLLLRLEGYTGVEVATHLRQKGIVVEKYEADRVLLLINYDFNPEQGKRLIEALGQLKPKTGKPNCWKEQFYPEENRLVMLPREAWLAKKERVATNQAKDRVAAQTVAPCPPGLAIVCPGEVIQADTIAALEAWGIEEIWVVK

SEQ ID NO: 15 - protein, 497 aa, Clostridium sp.
MNLKRQEHTPLLDAIKKYVESEPVPFDVPGHKMGSLKTELSDYAGEMLYRLDINAPIGLDNLYHPNGVIKEAEDLFAEAFGADEAIFSVNGTTGGIMTMIVGIIDAKDKIILPRNVHKSVINALILSGGIPIFVAPDVDQDTGIANGVPTENYVKAMDENPDTKAIFVINPTYFGITSDLKAICEEAHKRGIIVIVDEAHGAHLHFNDSMPLSAMEAGADISSLSVHKTGGSLTQSSVILVKKDRVNFSRIQRVFAMFSSTSPSHLLLASLDVARKKLVFEGKELLDKELELAKYAREKINNIRGYSCIDKSYCDRPGRFDFDLTKVVINVSEVGLSGFDVYKTIRKESNIQLELGEVSEVLAIISLGTTKEHVDKLIAALKRISDEYYDSTDVHKVPHFKYEYPELVVRPREAFHAPSKIVALEDAVGEISAESLMVYPPGIPIAIPGEIITKDALDLVEFYEKSGGVLLSDSPDGYIKVIDQEKWYLRSEINYDF

SEQ ID NO: 16 - protein, 780 aa, Burkholderia multivorans
MTASLTQPAFRRLGMKALLVQHDIDARTATARAATALADELRARLVDLVIATSADDARAVVDADPAIQCLLLNWELGDDPQHTPAQAVLDAMRARNATVPVFLLASRASASAIPVDAMRKADDFIWLLEDTTAFIGGRIVAAIERYRETVLPPMFRALAQFSRVYEYSWHTPGHTGGTAFLKSPVGRAYFEFFGESLFRSDLSISVGELGSLLDHSGPIGDSERYAARVFGAHRTYHVTNGSSMSNRVILMASVTRNQVALCDRNCHKSAEHAITMSGAIPTYLIPSRNHYGIIGPIMPERLTAAAVRLAIDANALVRGRDGIDATPVHALITNSTYDGLCYNVARVEALLGQSVDRLHFDEAWYGYARFNPIYRDRHAMHGDPAQHDASKPTVFATQSTHKLLAALSQASFIHVRDGRNPIEHARFNEAYMMHASTSPNYAIIASNDVSAAMMDGPGGEALTTDAIREAVAFRQMLGRLHAECAENDDWFFNGWQPDTVVDRKTGRRMRFHEADETLLATDPSCWVLHPGDAWHGFGDIEDDYCMLDPIKVSIVTPGIAPHGGLMPVGIPASVVTAYLDRHGIVVEKTTDFTILFLFSLGVTKGKWGTLVNTLLDFKRDYDANVSLEQALPDLVARYPDRYRKLGLRDLCDLMFAAMSDLKTTEMMSRGFSTLPKPDFSPAEAFEHLVHNDIEMLELSEMAGRTVATGVVPYPPGIPLLMPGENAGPADGPLLGYLKALEQYDLRFPGFTHDTHGVDVEDGVYRIACIKLPKRDGGNTR

SEQ ID NO: 17 - protein, 484 aa, Selenomonas sp.
MPYLSQTNAPIEEALVRMKRARLVPFDVPGHKRGRGNPELAAFLGAACLDVDVNSMKMLDNLCHPVSVIRDAEHLAAEAFRAAHAFFMVSGTTGSVQAMILSTVGRGDKIIMPRNVHRSAINALILCGAVPIYVNPGIEDTLGIALGMRTDDVAAAMERHPDAKAVFVNNPTYYGICSDLRAITEKAHARGMKVLVDEAHGTHLYFSDRLPTAAMDAGADMAAISMHKSGGSLTQSSILLCADTMPLGYVHQIINITQTTSASYLLLASLDISRRNLALRGREVIDRIIGLVAYARDEINAIGDYYAYGRELIDGDAVYDFDTTKLSIFTCATGLAGIEVYDILRDDYDIQTEFGDIANLLAYVSVGDRPKDIERLVAALAEIRRNYRKDPSKTLKMEYIDPVVVCGPQDAFYAEKESLPIQETKGRICAEFVMCYPPGIPILAPGEEITDEILTYIRYAKKKGCQITGPEDMSIQRLNVMTER

SEQ ID NO: 18 - protein, 768 aa, Yersinia pseudotuberculosis
MIDLSSHKKRNVLVVDSNIRDINTANGRAVNELIIALNDINFNVIAAATFEDGAATVISDSSLCCIFVDWTSGGNDDESHSQAFALLQDIRRRNKSVPVLLMAEHSCINSLSLETMQLVNEFVWMHEDTSEFIAARAKALIIKYYQQLLPPFTQALFQYTQDNPEYSWAAPGHQGGVAFSKTAVGREFLDFFGENLFRTDTGIERESLGSLLDHSGPIKESEAYAAQVFGAHASYSMLNGTSSSNRAIMAAVVGDKQIALCDRNCHKSIEQGLVLSGALPVFFIPTRNRYGIIGPIPKAQFQPTAIAQKIEQNPLKSLACDSKPVYAVITNCTYDGMCYNAQQAQDLLAKSVDQIHFDEAWYAYARFNPLYRERFAMRGDPADHDALGPTIFATQSTHKLLAALSQASYIHVRNGKKPIEHSRFNESYMLQSTTSPLYAIIAANEVGAAMMEGGQGLALTQEVIDEAVDFRLALARAHDAFAKQGEWFFKPWNTPEITDSKSGKKLPFSQASREQLTTDPACWVLKPGDPWHGFEQLEEDWCMLDPIKAGIMVPGMGDDGKLSEKGIPAAIVTAFLGQRGIVPSRTTDFMVLCLFSVGVTKGKWGTLINVLLEFKQHYDSNTPISVCLPDLAKNYPHQYAHKGLKVLCDEMFAYMKISEMDKLQAEAFSHLPTPVVLPRQAFQDHMAGRCELLPIDKLAGRVTAVGVIPYPPGIPIVMPGESFGSHEEPWLRYILSITKWGQHFPGFEKILEGSEQKNGQYFIWVLKQ

SEQ ID NO: 19 - protein, 476 aa, Carnobacterium inhibens
MDRKKVDSEQHRRPLFDGLNQHKKKEKVSFHVPGHKNGMNWDETWSSFQSALSFDQTEVTGLDYLHDPEGILKESQELLSKFYGSKKSYYLINGSTVGNLAMIMGATNKGDQVFVDRGCHQSVIHALELAELQPVFLTPDWAEMDQAPLGVNIKNLKEAFEHYPAVKALIVTYPTYDGMVYPIEELIEYARERKCLVLVDEAHGPHLTLGDPFPSSALDLGADAVVQSAHKMLPSLTQTAYLHIGNQSSDALKNKIEHYLHIFQSSSPSYPLMVSLEYARYFLADFTKKDLIATLKYRDLWKKQFKKAGLTIFQSDDPLKVKVSLINQSGEELAGQLEEQGVFGEKTDGTSVLLTFPLLKKETKITELFSIHITQSVKNEVPKKMKTPLLIAPFVELDLSYERQTSSTNKQISLAEAEGKIAARNITPYPPGIPLVLKGERIKVEQIKQINHYLDQNMRVTGLENQKEVVFFSEND

SEQ ID NO: 20 - protein, 472 aa, Bacillus cytotoxicus
MNQNQIPLYEALVRFKQQQPLSLHVPGHKNGLNFPKEAIDSFKDILSIDVTELTGLDDLHSPSECIDEAQRLLADVYEVQKSYFLVNGSTVGNLAMVLSCCGEEDIVLVQRNCHKSIINALKLAGANPVFLDPWIDEVYHVPVGVHNETIKKAIDQYPNAKALILTHPNYYGMGVNLKESIAYAHQHQIPVLVDEAHGAHFCLGEPFPQSAVAYGADIVVQSAHKTLPAMTMGSYLHINSDLINGEKVFRYLNMLQSSSPSYPIMASLDIARFALANMKEKGYHSIIEFINQFKEALHSIPQIKILQYPLQDELKVTVQSRCQLSGYELQSLFEQAGIYAEMADPYNVLFMLPLQVNEKYMKGIETMRSLLSHYKITDKRPSIRYTYKGGISPLPFTYKHLEEYETKRVPIEEAVGMIAAEMVIPYPPGIPLIMYGETIRLEHIREMAHLERTGARFQGNPAYIKVYVIERK

SEQ ID NO: 21 - protein, 710 aa, Candidatus Sodalis pierantonius
MNIIAILLPEHVFYKAEPVRELAQALTDQGYHIVYPSGSQDLLTLLEQNPRIAGIIFDWEQYGMDLCLAINEINEYLPLYAFISTHSVLDVSANDMRMALYFFEYGLNAAADISQRIRQYTAEYIDAIMPPLTKALFHYVEEGKYTFCTPGHMAGTAYQKSPVGSLFYDFFGGNTLKADVSISVTELGSLLDHTSSHLEAEEYIARTFGAEQSYMVTNGTSTSNKIVGMYASPAGSTVLIDRNCHKSLAHLLLMSDVVPIYLTPSRNAYGILGGIPQRQFSRACIAQKVAATPQASWPVHAVITNSTYDGLLYNTQYIKQTLAVPSIHFDSAWVPYTNFHPIYRGKSDMSGERTPDKVIFETQSTHKLLAAFSQASIIHIKGDYDELTFNEAYMMHTTTSPHYGIVASIEMAAAMVRGKPGRRLIQRSIERALHFRKEVYRLLQESEGWFFDIWQPEIIEDAVCWPVEPGAPWHGFRDADADHMYLDPIKVTILTPGMDETGEMASEGIPASLVAKFLNERGVVVEKTGPYNLLFLFSIGIDKTKAMSLLRGLTEFKRAYDLNLRVRNMLPDLYAEDPDFYRHMRIQDLAQGIHGLIRQQHLPQLMLNTFAVLPEMKMTPYAAFQQQVRGNVETVELSQMVGRISANMLLPYSPGVPVVMPGEMITEGSRAVLDFLLMLCSIGQHYPGFETDIHGAELTDDGRYWVRVLK

SEQ ID NO: 22 - protein, 471 aa, Clostridium sp.
MSNKTPLLDEVLKYKKEENLIFSMPGNKCGKVFLKDNIGKEFVDTMGYLDITEVDPLDNLHAPEGIILEAQQLLAKTYGVKKAYFMVNGSTGGNLCSIFAAFNEGDEVLVERNCHKSIYNGLILRKLKVKYIEPLIDEKLGIFLPPDKKNIYDAIEQCENLKGIILTYPSYFGITYDIEEVLLDLKKRGLKIVVDSAHGAHFIANNKLPKAIYGIPDYVVLSAHKTLPALTQGSYLLSNTDDNAVEFYLNTFMTTSPSYLIMSSLDYARYYLDEYGYDEYERLINKAEKYRSIINSLNKVHIISKEDLAEDYDIDKSRYIVTVSKEYSGHKLLEYLREQRIQCEMSFASGVVLLLSPINDDDDFKKLLKSFENLQLKDIRQDNYSKYYSFIPKKVLEPYEVFKKECKYIKINEADKNIACEAIIPYPPGIPLLCPGEVITKEAIDIIDDYISNNRSVIGIKNKEYIKVVIE

SEQ ID NO: 23 - protein, 457 aa, Pseudomonas sp.
MTQRQVINASVSPKGSLETLSQREVQQLSEAGSGSTYNIFRQCALAILNTGAHVDNAKTILEAYKDFEIRIHQQDRGVRLELLNAPADAFVDGEMIASTREMLFSALRDIVYTENELDSQRIDLSTSQGISDYVFHLLRNARTLRPGVEPKIVVCWGGHSINTEEYKYTKKVGHELGLRSLDVCTGCGPGVMKGPMKGATIAHAKQRIHGGRYLGLTEPGIIAAEAPNPIVNELVILPDIEKRLEAFVRVGHGIIIFPGGAGTAEEFLYLLGILMHPGNEGLPFPVILTGPKHAAPYLEQLDAFVGATLGEAAKKHYQIIIDDPAEVARQMTAGLKAVKQFRRERNDAFHFNWLLKIDEGFQRPFDPTHENMANLKLSRDLPAHELAANLRRAFSGIVAGNVKDKGIRLIEQHGPYQIRGDAAIMQPLDQLLKAFVAQHRMKLPGGAAYVPCYRVVA

SEQ ID NO: 24 - protein, 754 aa, Castellaniella defragrans
MKFRFPIVIIDEDYRSENASGFGIRALAAAIEAEGVEVLGVTSYGDLSSFAQQQSRASAFILSIDDEEFDEDSPEDVANAIKNLRAFIGELRFRNEDIPIYLYGETRTSQHIPNDILRELHGFIHMFEDTPEFVARHIIREARAYLDSLPPPFFRELLEYASDGSYSWHCPGHSGGVAFLKSPVGQMFHQFFGENMLRADVCNAVDELGQLLDHTGPVAESERNAARIFHADHCFFVTNGTSTSNKIVWHANVAAGDVVVVDRNCHKSILHAITMTGAIPVFLRPTRNHLGIIGPIPLEEFDPESIRRKIEANPFAREAANKRPRILTLTQSTYDGVIYNVEMIKEKLGSEIDTLHFDEAWLPHAAFHEFYEDMHAIGPNRPRSKDTMIYATHSTHKLLAGLSQASQIVVQDCESRQLDRNIFNEAFLMHTSTSPQYAIIASCDVAAAMMEPPGGTALVEESIREALDFRRAMRKVESEFGKNDWWFKVWGPNRLVPEGIGNREDWVLGSGDEWHGFGDLAEGFNMLDPIKATVVTPGLDISGTFADSGIPAALVSRYLVEHGVVVEKTGLYSFFILFTIGITKGRWNTLLTALQQFKDDYDRNQPLWRVLPEFSRAHKHYERMGLRDLCQKIHEAYRHYDFARLTTRVYLSDMVPAMRPADAYARMAHREVERVPVDRLEGRVTGVLLTPYPPGIPLLIPGERFNRDIVDYLKFTQEFNQQFPGFETDVHGLAYETDEQGRRHYYVDCIREGA

SEQ ID NO: 25 - protein, 473 aa, Lysinibacillus odysseyi
MKSERPLVEALQKFVEKEPYSLHVPGHKNGRLSTLPKEIKKALIYDVTELSGLDDFHHPEEAIDTAQKLLAETYGADRSFFLVNGSTVGNLAMVYAVCQQGDTILVQRNAHKSVFHAIELVGAKPVYLAPEWDDHTRSAGVVPLETIKEALREYPEAKALFLTYPTYYGVVAKDLREQIELCHAQQIPVLVDEAHGAHFTASKEFPISALELGADIVVHSAHKTLPAMTMASFMHIKSKFVSDQKVNHYLRMLQSSSPSYLLLASLDDARHYISKYKESDAVYCLERRKQWIEALESIPELELIEADDPLKVCIRMTGYTGIELKEAMEENLIYPELADIDQVLLVLPLLKHGDLYPYAEIRIRMKQVVTQLKMKKGSGQPQMGKQYKMASIITPNATFAEIEAKEKEWIPYMRSMGRIAGGMLIPYPPGIPLFVPGEKITVSKLSQLEELLAIGAAFQGEHRLEERLIQVLK

SEQ ID NO: 26 - protein, 378 aa, Azospirillum brasilense
MTDKIARFFEEQRPQTPCLVVDLDVVEANYHDLEEALPDAKIFYAVKANPAPEILGLLTRLGSAFDTASVPEIQMVLAAGCAPERISYGNTIKKEADIRRAFELGVRLFAFDSEAELEKIARAAPGARVFCRILTSGEGAEWPLSRKFGCDLAMARELLLKAKGMNVVPYGVSFHVGSQQKDLMQWDHAIFQVAQLFRELEVLGVDLGMINLGGGFPTRYRTDVPETTAYGQAIFESLRTHFGNRLPEAIVEPGRSMVGNAGIIESEVVLVSRKSANDVKRWVYLDIGKFSGLAETMDEAIQYPIQVMGDDGEGDSEAVVLAGPTCDSADVLYERAEYKLPMDLKAGDRVRIHATGAYTTTYSAVCFNGFAPLQQICI

SEQ ID NO: 27 - protein, 381 aa, Rhodobacter capsulatus
MGLSKTIWTQPSEIIRTKQPDHPVLVFSPTALQATARRFLKGFPGVVTYAVKSNPDEMVIQNLVAAGVKGFDVASPFEIDLIRRLAPGAALHYHNPVRGREEIAHAVRAGVKTWSVDSRSELDKLIEMVPAEKCEISVRFKLPVQGAAYNFGAKFGATADLAAELLRRAADAGFIPSLTFHPGTQCTDPAAWEAYILVASEICATAGVRAHRLNVGGGFPNHRKMGPAPVLEDIFALIDRATTEAFGSDRPILVCEPGRGLVGDAFTHITKVKALRDDTHVFLNDGVYGGLAELPLIGNIERIEVWSPEGFERGGDMVERIVFGPTCDSVDRLPGDVALPAELSEGDYVVFHGMGAYCSATNTRFNGFGQMEIVTALALKG

SEQ ID NO: 28 - protein, 636 aa, Pseudoalteromonas sp.
MLPLLRILLIEQDPSILKELSTNLSKTIANFERSDIHIDIIERLELKEALDCVEEDGDIQAVVLSWDVQNKVGEKMYSRFIEQLKRIRLELPVYVIGDDTKGLEIVNESEEIESFFFKDEVISDPEAILGYMINDFDDRSETPFWTAYRRYVGESNDSWHTPGHSGGSSFRNSPYIKDFYQFYGRNVFVGDLSVSVDSLGSLSDSTNTIGRAQESAAATFEVKHTYFVTNGSSTSNKIILQTLLRKGDKVIIDRNCHKSVHYGILQSASLPIYLSSILNPKYGIFAPPSLADIKQAIEQNTDAKLLVLTGCTYDGLLSDLKQVVEFAHQHGIKVFIDEAWFAYSLFHPSLRYYSAIHAGADYVTHSAHKVVSAFSQASYIHVNDPDFDADFFREIYSIYASTSPKYQLIASLDVCQKQLEMEGYKLLNALLNHVEEFKQQMASLKQIKVLGKQDFMEIFPHFSGDNMGHDPLKILIDISELPYSLKDIHKYLLDEIGLEIEKYTHSTILVLLTLGGTRSKIIRLYNALKKLDSGKVKLATSTRRSRLPENLPAIDLACIPSEAFYGERESVPISKSNNRICAGLVTPYPPGIPLLVPGQHITQEHVDYLKELAGQGLTIQGSFDGEIYVLKGKANK

SEQ ID NO: 29 - protein, 410 aa, Sphingomonas mucosissima
MHQDHRALGLAPLSTVARTSVSGAIDIAQGKPVQPVTLVRPHAAARAARFFVEKFPGRSMYAVKANPSPELIQILWDNGITHFDVASIAEVRLVARTLPDATLCFMHPVKAEEAIAEAYFTHGVRTFSLDSLDELEKIMRATRSAADLTLCVRLRVSSEHSKLSLASKFGVAPHEAKPLLFAARQAADALGICFHVGSQAMTPEAYADAMERVRAAIVDAAVTVDVIDVGGGFPSSYPDMAPPPLERYFETIHRAFESLPISYSAELWAEPGRALCAEYSSVVVRVEKRRGNELYINDGAYGALFDAAHIGWRFPVTLLREPQSTVRDHPFSFYGPTCDDLDHMAGPFLLPADVQAGDYVEIGMLGAYGSAMRTAFNGFGSDETVIVEDEPMVSLYTEVEREAASNVVKL

SEQ ID NO: 30 - protein, 484 aa, Unknown
  Description of Unknown: Butyrate-producing bacterium SS3/4 sequence
MDRERQKKAPIYEALEAFKKKRVVPFDVPGHKRGRGNPELVQLLGEKCVSLDVNSMKPLDNLCHPVSVIREAEELAAEAFGAASAYLMVGGTTSAVQSMILSVVKAGDKIILPRNVHKSVINALVLCGGIPIYVNPEMNQRLGISLGMQVEKVKQAIEDNPDAVAVFVNNPTYYGICSDIKTIVQLAHSRGMKVLADEAHGTHLYFGKNLPISAMAAGADMAAVSMHKSGGSLTQSSLLLLNKGVNTDYVRQIINLTQTTSASYLLLSSLDISRRNLALRGEESFAKVVEMAEYARREINSIGGYYAYGKELVNGDSIFDYDVTKLSVYTRDIGLAGIEVYDLLRDEYDIQIEFGDISNILAYISIGDRIQDIERLVGALDDIERLYKKDSSGLLSGEYISPKVVMSPQKAFYSEKVSVPVEASSGRVCAEFVMCYPPGIPILAPGEMITDDVVQYILYAKKKGCSMQGTEDPAVDHLMVLANI

SEQ ID NO: 31 - protein, 714 aa, Francisella sp.
MKSVVFIYPDNLKPYKEEFLSKIQSDLEAKKYLTLVIDNMQEVVEILEENSRVCCIVLDRSTFNLEAFHNIAHINSKLPIFAVSDYGQSIKLNLKDFNLNINFIQYDALASEDSEFIHKTIATYFNDILPPFTHRLMQYSKEFNSVFCTPGHQGGYGFQRSPVGTLFYDFFGENIFKTDVSISMQELGSLLDHSGVHEDAEEYVSKIFKSDRSLIVTNGTSTANKIVGMYSVADGDTVLLDRNCHKSLTHLMMMVDVNPVYFRPTRNAYGIIGGIPKSEFRRDVIEKKIADSNIATEWPSYAVVTNSTYDGLLYNTDTIHRDLDVKKLHFDSAWIPYAIFHPVYKHKSGMTIKPKEGHTVFETQSTHKLLSAFSQASMIHIKGDYNEEVLNESFMMHTSTSPFYPLVASTETAAAMMEGEQGFNLIDKTINLAIDFRRELLKLKRESETWFFDVWQPENIANKETWALRNADDWHGFEEVDGDFLFLDPVKVTILTPGIEDNNIQKNGIPADVVAKFLEEHDIVVEKSGPYSLLFIFSIGTTKAKSMRLLSVLNKFKQMYDENALVEKMLPSLYAIDPRFYEKMRIKDISDTLHSFMYESKLPNLMYHAFDVLPEQEMNPHRAFQKLLKGKVKKVPLTELYGNTSAVMILPYPPGIPLVLPGEKITEDSKIILEFLLMLEKIGSRLPGFGTDIHGPERARDGTLYIKVIDPDIE

SEQ ID NO: 32 - protein, 473 aa, Thermoanaerobacter thermohydrosulfuricus
MTAPLYEALMDYAKNQIIPFHMPGHKQGRTFPGEYLVNLAKIDLTEVPGLDNLHNPEGPILEAQKLAAKAFGARESFFLVNGTTSGIYAAMYAVLNPDDKILIMRNSHKSVYNGLVLTGTVPVYINPEIDYEDGIPMGIDINKLEEYLKKDEAIKAVVMTYPNYYGFCSDITGISDIVHKYNKILIVDEAHGAHFPFSNNLPLSSIQAGADIVVQSVHKTLSSFTQSSILHLNSDRVDTNRLKYSLSLFQSTSPSYILMSSLDIARDYMEKEGKNRLEKAIILADYARYEINTIEGIRCLGKEIVGKYAIVDFDKTKLTISVKNLGIKGPEAEKFLRENFNIQVEMADTFNILAMVTLADDKEKVDLLIKGIKGLANVKKDKKTAEEVAAYPDTPEMVLKPSEAVRQKTKLISLEEAEGRVSADFIIPYPPGVPLICPGERIKKDMVKYINVLYNKGIKILGLKNNSLLVCEI

SEQ ID NO: 33 - protein, 513 aa, Brevibacterium linens
MHQDSPMTSASDHSAFPGTAKTYAPYADALQAAAKRDSLFLSTPGHGGTTTGISAGQAEFFGEHTLSLDIPPLFDGIDLGVDTPKDEALQLAAEAWGARRTWFLTNGSSQGNRMAALAIGTLGTGVVTQRSAHSSFIDGIVLAGLNPGFVSPNVDEVNGIAHGVTPDSLRHAIAAHPEKVSAVYLVTPSYFGAVADVSALAEVAHEAGAALIIDAAWGAHFGFHPDLPESPVTLGADIVIMSTHKLAGSFTQSALLHLGDTEFANRLEPALARAFMMTASTSENAHLMASIDIARRDLVNSQDAIADSLDNIRQIRARIEGSEHYHLLSGDFMNHADVVDIDPFRLPIDITSTGLDGHAVRKRLTEEFDIFAEMATATTIVALIGIGKSPDLGRLFDALDQIRAENSGTPGAGTAESATRASGIPALPNAGELVALPRDAYFAESELVPAAEAIGRTSVSSLAAYPPGIPNVLPGERITAETVEFLQAVAASPSGHVRGGVDATLSMFRVLKD

SEQ ID NO: 34 - protein, 291 aa, Candidatus Accumulibacter sp.
MNLRDHVAAHPLLRRHFRFLTVTDLVPEEFRESQVESLYNIDTGWANLLKAWRFDEFALDPSRATLAIGLTGMDGDTIKNKYLMDKYDIQINKTSRNTVLFMTNIGTTRSTIAYLLGVLVKIAGDVDERVADMSTPERRIHDKRVRSLTLELPPLPNFSCFHQAFRGRSLDGRTETRDGDVRSAFFLGYEDGNCEYLTMEETAQAIKNGRECVSAQFVIPYPPGFPILVPGQVISAEILQFMQALDVREIHGFRPDLGFRIYTEAALEQAGQANAVWKAQINSTAAQVESE

SEQ ID NO: 35 - protein, 477 aa, Gracilibacillus halophilus
MMKKQQVTPLFDRLQDFAQQHYDSFHVPGHKNGRIVAHKGQDFFDQLLPLDVTELSGLDDLHAAQGVIQDAQRLAAEWFGATSSYFLVNGSTVGNLAMILATVTEGDQVFIQRNCHKSLIHGIELANAQPIFLSPDYDEAVERYTAPSLETIQLAFQQYPEVKALILTYPDYFGRTYDIKSMINYAHSYQVPVLIDEAHGCHFSLPFVPSDSALDCGADIVVQSAHKMTPALTMGAFLHIQSEQISSRDIEAYLQMLQSSSPSYPIMASLDLARHYLATYSKQHWHQLMAFIHEITTCFQDSPHWKVIAHGEKDDPLKLTIAINSRLSVSTVAHVFEQEGIFPEMIDDNQLLFVFGLTPHVDVDNFSRKLESIHQQLNSSIKHAKIEEKRMPQLVSKIDTLQLSYRDMKRRTKRWIRWEEAIHHIAAEAIIPYPPGIPFIIKGEEITRDHVDWIQHIFSYHAEVQPAHREKGLYIYM

SEQ ID NO: 36 - protein, 709 aa, Eikenella corrodens
MKNILLGCGHKELGDYLKSLIETLEKGGHTIRIAHDPQEILTFLKHDARIGSVLCTLDIFNRELDEQIIALNDELPVFILKPTDCDKPVDFGAVGDHATFIDCHLFSNEDVVDKIEKAICHYIDNITPPFTKALFDYVDKNKYTFCTPGHMSGTAFLKSPVGSLFYDFYGENTFKSDISVSMGELGSLLDHSGPHKEAEEYIAETFNADHSYIVTNGTSTANKIVGMYSVPAGSTVLIDRNCHKSLTHLLMMSDITPVYLKPTRNAYGILGGIPQKEFTKEVITEKLTKVPGATWPVHAVITNSTYDGLFYNTDKIKDTLDVKSIHFDSAWVPYTNFSPIYNGKTGMGGKQVKDKVIFETHSTHKLLAAFSQASMIHVKGNLNTATFGEAYMMHTSTSPFYPMVASTEVAAAMMRGNSGKRLMQDSLERAVKFRKEIKKHKAHADSWYFDVWQPENVDNIECWELHQTDKWHGFKDIDAQHMYLDPIKVTLLTPGLDKNGELEKTGIPANLVSKFLEDRGIIVEKTGPYNILVLFSIGVDDTKALSLLHALNEFKSLYDANATVEEVLPRVFNESPSFYQDMRIQELAQGIHSLICKHNLPELMFSAFEVLPTMVMNPHKAFQLELKGQIEDCYLEDMVGKINANMILPYPPGVPLVMPGEMITEESKPILEFLMMLCEIGAHFPGFETDIHGAYRQEDGRYKVKIVKA

SEQ ID NO: 37 - protein, 415 aa, Rhodospirillum centenum
MGQIRYRSAVSPVRRSFARPVELPDVDATVAALRPAEPLHCLRPAVLKATARRFVAAFTEAVGGDVLYAVKCNPDPAVLRALWKGGVRHFDCASPAEVRVVRSMFPEAVIHYMHPVKNRAAIRVAYRELGVRDFALDSVEELAKLREETGDARDLGLIVRLALPKGNATYDLSGKFGAAPDAAAGLLRRARALSPRIGVCFHVGSQCLTPDSYGDALRLAGGVIRASGVPVDVVDVGGGFPVSYPDMTPPPLDAYMEAIRAGIAGLGLPAGTRVWCEPGRALVAAGSSVVVQVEKRRGDELFVNDGVYGSLSDAGVPAFRFPCRLVRPAGTDTAPLMPFSFWGPTCDSADRMKGPFLLPADVREGDWIEIGQLGAYGATLRTEFNGFDQARLVEVADGPLLETPGHGVPARLPAK

SEQ ID NO: 38 - protein, 469 aa, Anaerobranca californiensis
MKIKKLQNLYIYNKNNKKRYIKFHMPGNYGGKNLNKKFRKYMPFFETTEVYGTDDYHNPQGIIKKAEKSTAKLFNSNHCIYLVNGSSSGIIAAISYLFREGDQILVSRDCHKSVIYGLILSGAEPVFSEHSGASPLDYQGIQQAIKKIERIKGIILTTPNYYGIGNKDLKLIVQLCNKYKIKLLVDEAHGSHLYFTDLKVYLANTCKADLVVNSTHKNLTGLTQTGVININAEDINLSELRKHISLTTSTSPSYILLASIAYCTEQYTQIGEKILQKTIKKGNYMKELLDKYKIRYIKEKDLNSNQYLDPTKITLLFKDNKKAKEVFKQLIKNGIIPEFLADNKILLFINYKISKRELVKTAAILKRFSTEEEDILYSQENCFRIRNTGVLTPREAFYSQKEKIPLKKAKGKVVVQPITPYPPGIPILFPGEVVTEEIIKYLKNSNFSSIHGIENGMIEVVKDKFFDDK

SEQ ID NO: 39 - protein, 491 aa, Bacillus coagulans
MIRGTDMDQNRMPLFEALCRYQHTNPVSFHVPGHKNGLLIEPLLKESASFLQYDATELSGLDDLHHAEGAIQEAQDLLADYYGSEKSYFLVNGSTVGNLAMILSVCRPGDRVLVDRNCHQSVLHALRLARANPVFVFPEIDEELQMPAGFSEKVFVQAFRQYRDVKACILTYPTYYGITCDLRAVAEIAHQNGAYVLVDEAHGAHFQVGSPFPETALHQGADAAVQSAHKMLPAMTMGSFLHIRAPHFPFERLKFYLSALQSSSPSYPIMMSLDYARWYAANFSREDICYTLSQREQFSARLGKMLKLEEKEGQDPLKLLAAFPGLSGFKLQSVLEKAGVYTEMADLQRVVFVLPLLKNGMPFPYEDAAGRIEAALAGASPQAGNQPRLERAEQKPASGETAGLDALQGLTELHLAYDEMEEKEAEWVSFEEAKGRIAAKMVTPYPPGVPLLVPGEQVRDAHLYQIQQLRACGAGFHADAPFFENRLAVYR

SEQ ID NO: 40 - protein, 467 aa, Gloeobacter violaceus
METTPLWDALRAVALASGTGFHTPGHNGGAGLPPALKHWPDWGRLDLTELAGLDNLHAPTGVIAHAQRLAAAVWGAERSWFLVNGATAGIQAMLLAALGQGQKVLVPRNCHQSIVHALVLSGAVPVFVQPVWDRRWQLAHGLTATTVEAALAVHPDIRAVVAVHPTYFGAVGETRAIARVAHAKGIALLVDAAHGAHLRFHPDLPECALAAGADLVVHSAHKTLPALTQAALLHQQGTLVDPARVEMALNLLQTTSPSYLLMASLDLARAHMVRHGREQLGHILEMAHRLRHKLPFAVLGGDGTPGFDPTRLVIDVGEKGWSGHAAETWLEQNAQVRAEMATHRHLVFILNSAHTEFDGEQLQASLLALATAQPTGATPPDLLPPPLPELRYSPREAFGRSHRSVPLAAAAGLTSAADVCTYPPGVPVLLPGEVVAAQSVEYLGAAIDTGAETVGIDGRGHIRVTID

SEQ ID NO: 41 - protein, 2490 aa, Plasmodium malariae
MNSVNDSMYSGDTNSLHVNSLYENNPDKSVKNINAVNDYITSSNAMSEEAETAAGNDELIPNSSSNHIHSQYKHRHQYKQYHQYNPHNQHKQHHQYKKLHPYKQYHQEKELPKYQPLPQYQHSTQYQGSKPHSQSQLHDGGKKRREKGKVERNKYDKIEELEKYININNATNVCSLRIKLWEALMLYVNNLKIELVYFIIYCLEEIEVYWGEEATDNLRDIINLINDKKYKEVLNKIGETLSSLSVTTGKTTEENPFFYTLIVSGRRDENNNNNNNNSNNNYNYNNNNSDLGCELNKILHYEHNRLSNQSNNKKLEYKIIEASNAKEALLACLINPQILSVVLVDNLTIDEEKVKERDYYKFNEDNMLNANCANSSYLLNCNLQNNTQMVMKNPLNHNGMMHSGGVTTVQNSKDVLLIGNSMLPEYLNNNNVNINENSNVRSLRSLYIKRNYKFDIGDFVIGYEQLVSAPLEKMKKGFNILVILIKSIAYIRSSVDIFCVCTSITLDKLHSVNNKIIRIFTTHDDHSDLHESILDGVKKKIKTPFFNALKAYAERPIGVFHALAISKGNSVRRSRWIQSLLDFYGVNLFKAESSATCGGLDSLLDPHGSLKEAQIMAARAYGSKYCFFVTNGTSSSNKIVMQALVKPGDIILVDRACHKSHHYGFVLSQALPCYLDPYPVSRYGIYGAVPIYVIKKSLLDYRNSNKLHLVKLLILTNCTFDGIVYNVKRIIEECLAIKPDLIFLFDEAWFAYACFHPILKFRTAMTVAEKMRSKEQKRIYYKVHKKLLKKFGNVKSLNQVSADKLLKTRLYPNPSEYKIRVYATQSIHKSLTSLRQGSVILISDDNFESHAYTPFKEAYYTHMSTSPNYQILATLDAGRAQMELEGYGLVEKQTEAAFLIRKELSEDPMISRYFRILNAEDLIPDSLRQCAVSYMKRKKKIIKEYDSSDSRCSANVTYSCVSNNNTRGIVDPSDSGKYYLSGEQNVVHSVNASSFECVRGTNGATNSNHTNNSTTSNNRANSPARNCHVKSPTSNYHTNNCPTSIHIGTSVMLSNTNSNNIVQGNNNNNVKSSNNSPRSALNGVAAKSTEIVESYTSCNIYSEDSDYQKVSKSGNIKRYIKKKKNQNCREAPCVSYDGSNFSGANSENCENCENSKNSRNSRNSQNSRNSRNSQNSQNSENENLSFLENSNNKRYNNSYGYSSGLKNFLEYFECSWLSEDEFVLDPTRITLFTGYSGIDGETFKVKWLMDKYGIQINKTSINSVLFQTNIGTTGSSCLFLKSCLSLISQELDQKKSLFNERDLNQFNENVFNLVSNYIDLSEFSEFHPLFKKRYTDPKIFNKEGDIRKAFYLAYEEDYVEYILLSDLKERIRQNEMIVSASFIIPYPPGFPVLVPGQIVSQEIVDYLSGLSVKEIHGYDENIGFRCFYNFVLEYFYNMVISDPYSLYQKIDKETYEKLKHMSLSKRKSLESVCYLYIYDNESNKMKKVYLCSGNVSTENNTIVSDTCDEITQNHARRSYNKKGKQTSIYENFSKSAQNAGNASGVGNVSGKIGNIIYGDNFNNCANGKDICHHLYGKEEEGFFDVNDENAFGNDVLHLNHYAIKNPLKKGTTETFIKKTCNQKSSWKEKITDKYHGTPNGTRRDKHNVLSSKKKENGRKCKGIQVNNNNNNNNVILINSESYDHDQKVIDLVDTPEKSNKNYECHEHDGRDNDDDDDRHSGGGSNYNRDSSNNSHNVDRKRYVVGTDKHSGSSNTHNVGTDKHSGGSNTHNVGIDKHSGGSNTHNVGIDKHSGGSNTHNVGTDKHSGGSNPHNVGTDKHSHSGSSNNNKRSLERKKKRNEGNYMSLSYKANIYGHKVVFNRGNNNNDDANVKAYNEKDGKGGERNNNCTFYDKNVNGMNRERSLKNISYMSNISEIRGMNNVNNVRRKNRIDEGKNRNIKGTDDSDYLLSEVTANMSKNIGPISDIYSLKKISKLNRSDDGKYENSLSDYVPKLKSSNIVIYNKVKKNALLMGRKHMSDGKSRNNHHRKNSHMNQKSNKDYVYYSDSSKKINEIIYMKRQDGDLTEENAIVKENLNELNSNLFYSNGTGNKGGDIKGPEKNSSNNSGTLSGTNNGNNSNSSIQNFANVNEKAGGITFTTPNIVADEYCDKKEIPIKRGNNSGDNNGLNSGLNSGYNSGHNGVHNSCNDSSNKPIINEGTGYNNSYHSDQDANKSNEEKYKSNGLIRPNNLERNIILGNEIIVEKDNNLSYRNISGHNLNETNSYVYANDGTIAEGHYGNNNMARGSNIGCSDDIEGSEDIEGGEDIEGGEDIEGGEDIEGGEDIEGGEDIEGGDDIEGSYNIRSSSNIYMGNSNAISDVAQVSGSVNDANISNLMGHVKDEIGFCGKNFLYSENELKMNALLREEEKDKSTIRNLNTLNNNSYINNLITNVDDDTFIHKEGNFFLECTLTNSEMNCSSFEMDMSLNNIYPNGGEHVKQHRKYDDDLKKEF

SEQ ID NO: 42 - protein, 465 aa, Prochlorococcus sp.
MKISDLLTYKRGKNLFLPAHGRGFALPTDLRRLLRKRPGIWDLPELLDIGGPLCSIGAIAVSQDESAKVFGADHCWYGVNGATGLLQASLLAIAKPGEAILMPRNAHRSLIQACVLGDIVPVLFDIPYLSDRGHAYPPDIDWLNKVLKLTSSCKLDITAAVLINPTYHGYSSELSILIKRLHKQGLKVLVDEAHGTYFASDIDKGLPVSALKAGADLVVNSLHKSAQGIVQTAVLWSQGQLVDPSVISRCLGLLQTTSPSSLLLASCELALKELTSRSGKRNLSSQIDDARDVFLRLKNLGLPLLKNDDPLRLVLHSSYHGICGFDADKWFIKHGIIGELPEPGTLTFCLGFNPLKGLAHAMKKCWYKLLLDNTSPKTYPPFPGPNFPLLSHPSMSCSLAYRSNSNLVMLNEAEGLVSADLVCPYPPGIPVLIPGELLDQQRINWMLGQHKFWPNQIPLQVRVVS

SEQ ID NO: 43 - protein, 474 aa, Bacillus megaterium
MDTYLPLYNRLVSHSEKRSLSYHVPGHKNGQILPSHIQSSYADFLQYDLTEISGLDDLHEAESVIKEAQELTAKLYGVDESFFLVNGSTVGNLAAILSLCHEGDKIAVQRDSHKSIFNAIALSKASPIFLAPEIDSKTHLSTGVSIKTIKAALEGSQDIKAFVLTNPTYYGVARDLKEIIDFIHGYNIPIIIDEAHGAHFILGNPFPSSAVTYGADLVVQSAHKTLPAMTMGSYLHMQGTLINKQSVRHHLQVLQSSSPSYPIMASLDLARYYLQQFTQYDIDRMTENIHSFVEKINEIDTLSTIDVETDQTATDLLKMTLTCSAATGYHLQKELEKQDIYTELADVNYVLFVLPLSSSWDFNDTIKRVRQAVENIQRKSYEKLIIKPFRFSRATVLLPMEERKLRTKHMCSFEEAIGRVSAQSVIPYPPGIPILMEGETITSNHIDYILHIQRLNGHIQGGSCIEEGKIEVFK

SEQ ID NO: 44 - protein, 713 aa, Escherichia coli
MNIIAIMGPHGVFYKDEPIKELESALVAQGFQIIWPQNSVDLLKFIEHNPRICGVIFDWDEYSLDLCSDINQLNEYLPLYAFINTHSTMDVSVQDMRMALWFFEYALGQAEDIAIRMRQYTDEYLDNITPPFTKALFTYVKERKYTFCTPGHMGGTAYQKSPVGCLFYDFFGGNTLKADVSISVTELGSLLDHTGPHLEAEEYIARTFGAEQSYIVTNGTSTSNKIVGMYAAPSGSTLLIDRNCHKSLAHLLMMNDVVPVWLKPTRNALGILGGIPRREFTRDSIEEKVAATTQAQWPVHAVITNSTYDGLLYNTDWIKQTLDVPSIHFDSAWVPYTHFHPIYQGKSGMSGERVAGKVIFETQSTHKMLAALSQASLIHIKGEYDEEAFNEAFMMHTTTSPSYPIVASVETAAAMLRGNPGKRLINRSVERALHFRKEVQRLREESDGWFFDIWQPPQVDEAECWPVAPGEQWHGFNDADADHMFLDPVKVTILTPGMDEQGNMSEEGIPAALVAKFLDERGIVVEKTGPYNLLFLFSIGIDKTKAMGLLRGLTEFKRSYDLNLRIKNMLPDLYAEDPDFYRNMRIQDLAQGIHKLIRKHDLPGLMLRAFDTLPEMIMTPHQAWQRQIKGEVETIALEQLVGRVSANMILPYPPGVPLLMPGEMLTKESRTVLDFLLMLCSVGQHYPGFETDIHGAKQDEDGVYRVRVLKMAG

SEQ ID NO: 45 - protein, 746 aa, Methylotenera versatilis
MKFRFPVVIIDEDFRSENSSGLGIRMLAKAIETEGFEVLGVTSYGDLTSFVQQQSRASAFILSIDDNEFIEGNRDALDNLRKFVDEIRYRNEEIPIFLHGETRTSRHIPNEILRELNGFIHMYEDTPEFVARYILREAKAYLDSLPPPFFKALTEYAADGSYSWHCPGHSGGVAFLKSPVGQMFHQFFGENMLRADVCNAVDELGQLLDHTGPVAASERNAARIYNCDHLYFVTNGTSTSNKMVWNSTVAPGDVVVVDRNCHKSILHAIIMTGAIPVFLMPTRNHFGIIGPIPKSEFEWENIQKKIDRNPFILDKTSKPRVLTITQSTYDGVLYNVEEIKDMLDGKIDTLHFDEAWLPHATFHDFYGDYHAIGEGRPRCKESMVFSTQSTHKLLAGLSQASQILVQDAENNKLDRDIFNEAYLMHTSTSPQYSIVASIDVAAAMMEAPGGTALVEESLMEALDFRRAMRKVDEEWGTDWWFKVWGPDDLSEEGLEERDAWMLKANDAWHDFGNLAPGFNMLDPIKATIITPGLDIKGNFSDKFGIPAAIVTKYLAEHGVIVEKTGLYSFFIMFTIGITKGRWNTMVASLQQFKDDYDKNQPLWKVLPEFVQKQPRYEKIGLRDLCEQIHAVYRANDVARLTTEMYLSDMVPAMKPTDAFAKMAHRKMDRVPIDDLEGRITAVLLTPYPPGIPLLIPGERFNKVIVNYLKFAREFNEKFPGFEADNHGLVKVVVDGKATYFVDCVEQ

SEQ ID NO: 46 - protein, 2475 aa, Plasmodium reichenowi
MKFSNDPNFQIDEDSLHMNNIHQNKIEEDVIPDSKAVSDYNVNNQEVQRKSLSLKEDEKMRINSVGVYKVKREEYKNNMNPRNVQEKNINQMYKHHKNVPTKVYDENIEYQRKNYEENLYGNTKYDRIKELENYININNATSVCSLRIKLWEALLLYVNNLNVEFIYFIISCLKEIEVYWGQEATENLHEIINLINDKKYKEVSNKIRETLSSLSVTTGKITDENPFFYTLIVSSKRNENRSSSTNNYSDLTCELNKILQYEHNRLSNQINNKTLEYKIIEVSNAKEALLACLINPQILSVVIVDNLNIDEESVEEKDIYNYYNDENNSVRNHSVANSYVYNSSIVNNLHMPINKSSMNNIAVNALALNNKDIYMKGMMGTSRHHNNNNNNNKNNNNKNNNNNNNNNNNNNNNNNNSGVIDFRKNKSYNYSNNYLNNNTNLNKYNDSNKKYMINNMNYMNNLNKMYNMNNMYNMYNMCNINYNNDNICHHQFKEYKFNIADFVLGYVQLVSAPLEKMKKGFNSLVILIKSIAYIRSSVDIFCVCTSITLDSLQSVNNMIIRIFTTHDDHSDLHESILDGVKKKIKTPFFNALKAYAERPIGVFHALAISKGNSVRRSRWIQSLLDFYGVNLFKAESSATCGGLDSLLDPHGSLKDAQIMAARAYSSKYCFFVTNGTSSSNKIVMQALVKPGDIILVDRACHKSHHYGFVLSQAFPCYLDPYPVSKYGIYGAVPIYVIKKTLLEYRKSNKLHLVRLIILTNCTFDGIVYNVKRVMEECLSIKPDLIFLFDEAWFAYACFHPILKFRTAMTVAEKMRSTEQKRIYEKIHKKLLKKFSNVKSLNDVPEEELLKTRLYPNPNEYKVRVYATQSIHKSLTSLRQGSVILISDDNFESHAYTPFKEAYYTHMSTSPNYQILATLDAGRAQMELEGYGLVEKQTEAAFLIRKELSEDPIISKYFRILNADDLIPDRLRQCTVSYMKRKHVNNNNNKKKKNDDDNNNDGDDNNNDDNNDGDDNNNDDNNDGDDNNNDDDNNNDDDNNNDGDDNNNDDDNNNDDDINHNSNHNSNNNSNINNNVGNQKKYNNSLNCRCSGDENSTGSYIFNNNIKEIEDNTESAHKIPIEYVDGKLFNVIKYPHEYMSEDNSPNNIPTNLQKSNMKLINYNNIEVGRILESSNCFKYSHNVNMSNVLINNSSYKNNSDNKKDGFEKRYVCNEYNERVKENCPNDDTNYDATYKGYVNEDVNVNMNGHVNVNMNGHVNVNMNGHVNVNMSDLMNGDNKSDWCDTNDCDDNKNIYCDKANNIYYYGNNYKSKEEKRKKANYGSVNSICCDSTYCMDTSDDNFSSNEYSSYIDNNHHNNNNNNNNNNNNNNINNINNNNSNSNNNSCSGDMKNFLEYFERSWLSEDEFVLDPTRITLFTGYSGIDGDTFKVKWLMDKYGIQINKTSINSVLFQTNIGTTGSSCLFLKSCLSLISQELDQKKSLFNERDLNQFNESVYNLVYNYIDLSVFSAFHPLFKKRYEDKNIFNNEGDLRKAFYLAYEENYVEYILLNDLKDRIRHKEMIVAASFIIPYPPGFPVLVPGQIISEEIVNYLSGLSVKEIHGYDENIGFRCFYNFILDYYETININDPYSMYQPMDKTLYEQLKEKYLHSKKDLHDHRLSNLYMYDKETKKMKKVYIHNNNGSYSVDPYGSISDLNEEEGVIINAQLVNNKKDIFLRNKRENKIHNNNNNNNKKKTHVNNKSDVMIIIPSGDHLNPHITHKMNDNNRKIINTKNYNNIINYTSNILNNKQDHAFYNSGSPRTSVCSNPKNMNTNDMCNNLMHKNDERGNNKSMLKHEKNNHSLYLTNGLNTKSHKKMYIESYNPKGDRELDFQNKSTMCNHMDDVAYHGKHYHSVKKDIINNDTSLKENTYNKNIMSCKTNNNTGTNSKNERKKKKSLGIHMSLAPNINHLKGHDTSRYSDSTSICEDNINDENVDDTGHKKIDPIDGHNIRNKKFDIKEIHYNNNNDIYGNPCDVIPCKENMYINEKDSYSDVVLIKRNNKINKSDGNYHNNNSNNSSNNNSKHSNVVPILNKGNILLNNTNVKNDYCVIQKDNKIMSRNNMNTKYASSIEYKNKKEGGAYYSDSSKNIHDNLFLKRKENENVQYITKKDVMKREPLIGYNKEEIKKINEFLKINRRIADEPIGDTQIKLDEEILERKEEDIYDNNKNDMFNANIKNNIEDVADNSAQMNIDKKDIIVLPSNNNYCDINNNSCNYVKKCETNKCDIYITKDNLEEIQKTNMNIKKDVEHDIAEYNFDSVINQSVNNNINILLDKYNCNNIKKLNNSNIYENNNLLSNDNNYSVNHKVYNSIENINTLNCDNIKTDNNNNNNNNMSYKEYKVRGLIICENDINKNTGRQLNTLNNNSYINNLITNVDDDTFVHREGNFFLQCEFANSDINCNMYEMETSLNNMCTNPGEVIIKNNMEYNDCETKHK

SEQ ID NO: 47 - protein, 484 aa, Streptococcus australis
MLNQNQAPIYEGLVKLRKKRIVPFDVPGHKRGRGNPELVELLGEKCVGIDVNSMKPLDNLGHPISIIRDAEELAAEAFGAAHAFLMIGGTTSSVQTMILSTCKAGDKIILPRNVHKSAINALVLCGAIPIYIEMSVDPKIGIALGLENERVAQAIKDHPDAKAILINNPTYYGICSDLKGLTEMAHAAGMKVLVDEAHGAHLHFTDKLPLSAMDAGADMSAVSMHKSGGSLTQSSLLLVGDQMNPEYVRQIINLTQSTSASYLLMSSLDISRRNLALRGKESFEKVIELSEYARREINAIGGYYAYSKELVDGVSVFDFDVTKLSVYTQGIGLTGIEVYDLLRDEYDIQIEFGDIGNILAYISIGDRIQDIERLVGALADIKRLYSRDGKDLIAGEYIQPELVLSPQEAFYSERRSLTLDESVGQVCGEFVMCYPPGIPILAPGERITQGLVDYIKFAKERGCSLQGTEDPEVNHINVIERKEN

SEQ ID NO: 48 - protein, 751 aa, Marinobacterium sp.
MKFRFPVVIIDEDFRSENISGSGIRDLAEAIGKEGMEVVGFTSYGDLTSFAQQASRASCFILSIDDEEFGSGSDEDVSIALKAIRDFITEVRKRNNDIPIFLYGETRTSRHISNDILRELHGFIHMFEDTPEFVARHIIREARKYLDCLAPPFFRALMDYASDSSYSWHCPGHSGGVAFLKSPVGQMFHQFFGENMLRADVCNAVDELGQLLDHTGPVSASEANAARIFNADHLFFVTNGTSTSNKVVWHSTVAPGDIVVVDRNCHKSILHSIIMTGAIPVFLMPTRNHYGIIGPIPKSEFDPETIRKKIEANPFARKAKNKKPRILTITQSTYDGILYNVETIKSMLGNTIDTLHFDEAWLPHAAFHPFYRNMHAIGEGRPRSDETLVFATQSTHKLLAGLSQASQILVQDGTNRKLDTHRFNESYLMHSSTSPQYAIIASCDVAAAMMEPPGGKALVEESLHEALDFRRAMHKADEEFGKDDWWFKVWGPLPQSEEGVGDRDDWVIHEDDTWHGFGRIESGFNMLDPIKSTIITPGLNLNGEFDEDGIPAAIVSKYLAEHGIIIEKTGLYSFFIMFTIGITKGRWNSMVTELQQFKDDYDHNLPMWRVMPEFAAKHPQYERIGLRDLCSAIHSVYKEYNVARITTDMYLSNIEPAMTPADAWAKMAHRDVERVSIDELEGRVTAMLVTPYPPGIPLLVPGERFNATIISYLKFARDFNSRFPGFETDVHGLVRESVDGEDRYFVDVVKD

SEQ ID NO: 49 - protein, 504 aa, Bacteroides pectinophilus
MLPTNSGQKTFDNEDDLFDRLENYCSSGYIPMHMPGHKRNTQLIDTGNPYGIDITEIDGFDNLHHPDGFLKEAQERAAQYYDAAKTWYLVSGSSIGLMSAILGVTSRHDTVLVARNCHISVYNAIYENELNPQYIYPKFVDNLWISSGILSNDVEKALKNCVKNEKGSGKVGAVIITSPTYEGNVSDIRAIADVVHKYGVPLIVDEAHGAHFKYSEKFPQSALGLGADVVVQSLHKTLPSLTQTALLHVGREAVNKKRLIADIDRYLNMFQSTSPSYILMGSINRCIRLMNSERGRAVMDNYTKELEKLRRRLEKLRVIKLAKSDDISKLVIYTEDGCLQGKQLYDILLKRYRIQLEMASLRYVIAMTGPGDTKEYYDRFYDALCEIDKELAGRSGTSDIGSSETVNISRPVIKMNLYDAVNCEDKESVEYHDACGRVSASTVCIYPPGIPLVCPGEVINRNMIDTVDNAFRDGLDVMGLEGLEAGLCGAAPDERKIVKILCLR

SEQ ID NO: 50 - protein, 753 aa, Rhizobium etli
MEFQMAFPIAVIDEDFDGKSAAGRGMRDLADAIEKEGFRIVSGVSYEDARRLVHIFNTESCWLVSVDGAEDKTTRWQLLGEVLAAKRQRNDRLPIFLFGDDTTAEDVPAAVLRHANAFFRLFEDTAEFMARAIAQAARNYLDRLPPPMFKALMDYTLEGAYSWHTPGHGGGVAFRKSPVGQLFYTFFGENTLRSDISVSVGSIGSLLDHVGPIAEGERNAARIFGTDETLFVVGGTSTANKIVWHGMVGRGDLVLCDRNCHKSILHSLIMTGATPIYLIPSRNGLGIIGPISKDQFTPESIAHKIAASPFAAQTSGKVRLMVITNSTYDGLCYNVDAIKASLGDAVEVLHFDEAWYAYANFHEFYDGFHGISSNQPARSQNAITFATHSTHKLLAALSQASMIHVQHAETKRLDITRFNEAFMMHTSTSPQYGIIASCDVAAAMMEQPAGRSLVQETIDEAISFRRAMNRVKKQAEGSWWFDVWEPTVAEQTPSDTHADWVLKPGDAWHGFTGLAENHVMVDPIKVTILSPGLSASGAMDEHGIPAAVITKFLSSRRIEIEKTGLYSFLVLFSMGITRGKWSTLVTELINFKDLYDANAPLTRALPALAAAHPQAYAGVGLRDLCEKIHAIYRKDDVPKAQREMYTVLPEMALRPADAYDRLVKSRIESVEIDELMNRILAVMIVPYPPGIPLIMPGERITQSTKSIQDYLLYARDFDRKFPGFETDIHGLRFAPGDGGRRYLVDCIAGEEQE

SEQ ID NO: 51 - protein, 780 aa, Pseudogulbenkiania ferrooxidans
MRTAVLSALYPSVPVTFRYAVYEDTGMRFHFPIVIIDEDFRSENTSGSGIRELAAAMEKEGMEVVGYTSYGDLTSFAQQQSRAAGFILSIDDEEFGSGTPEEALDALANLRNFVAEIRRRNPDIPLYLYGETRTARHIPNDILRELHGFIHMHEDTPEFVARHIIREAKSYLDTLAPPFFRALVHYAHDGSYSWHCPGHSGGVAFLKSPVGQMFHQFFGENMLRADVCNAVDELGQLLDHTGPVAASERNAARIFSADHLFFVTNGTSTSNKIVWHSTVAAGDIVLVDRNCHKSNLHAIMMTGAIPVFLMPTRNHYGIIGPIPKSEFQLDNIKKKILANPFAREALEKNPGAKPRILTITQSTYDGILYNVEEIKSMLDGEVDTLHFDEAWLPHASFHDFYGDFHAIGEGRPRCKDSMIFSTQSTHKLLAGISQASQILVQDPQNRQLDTAWFNEAYLMHTSTSPQYAIIASCDVAAAMMEQPGGQALVEESLVEALDFRRAMRKVDEEYGHDWWFKVWGPNELSDDGICDPADWELEPDERWHGFAGIEEGFNLLDPIKATILTPGLDVDGSFEEMGIPAAIVTKYLTEHGVVVEKTGLYSFFIMFTIGITKGRWNTLISLLQQFKDDFDKNQPMWRIMPEFVAKYPQYERVGLRELCQRIHQLYSKHDIARLTTEIYLSEMEPAMRPADAFAKMAHREIERVPVEELEGRVTSVLLTPYPPGIPLLIPGERFNRTIVDYLRFAQEFNGELPGFETDVHGLVAMEKNGKKVYCVDCVKQ

SEQ ID NO: 52 - protein, 502 aa, Roseburia intestinalis
MRYLDQALEAYGKSDVYPFHMPGHKRNPLPFPEVYGIDITEIDGFDNLHHAEGILKEAQQRAADLYGSAHCYYLVNGSTCGILASICAAVKKRGRILVARNSHKAAYHALFLSELTAEYLYPAVTECGIQGQITPRQVEDALKKDPETSAVVITSPTYEGVISDIEGIAKVAHVHGIPLIVDSAHGAHLGFGGEFPQNAVRLGADAVIESLHKTLPSFTQTALLHLNSDLISKLRIEKYLGIYETSSPSYILMAGMEVCIRTVKEHGAELFDNYRHELNKFYKNCEDLKRLHVMTGKDLSKEEAFAWDDSKIVIFVRDSSKSGEWLYQELLLKYHLQLEMASGDYALAMTSIMDQEEGYQRLSAALHEIDRELCGAGTAKKQQAMNEKKVRYGNETDGSMENMYEQQVHRGSFIQEVYRPNPAQMQIYEAEEKETAEVSFDEAAGRVSADFIFLYPPGIPLIVPGEAITAEFIERLRTCISLKLNLQGSTDLFAERIKIVYF

SEQ ID NO: 53 - protein, 502 aa, Roseburia intestinalis
MKSRACRFLWKPRGIFLVMDKEQQMRAPVYEALEKLKKRRVVPFDVPGHKRGRGNPELVELLGEKCVSLDVNSMKPLDNLCHPVSVIKEAEELAAEAFRAEHAFFMVGGTTSSVQGMVLSCCKAGDKIILPRNVHKSVINALVLCGAIPVYVNPEVDVKLGISLGMQVSEVERAILENPDAVAVLVNNPTYYGICSDLRSIVRVAHEHHMLVLVDEAHGTHLYFGENLPVCAMDAGADMASVSMHKSGGSLTQSSLLLTGKGVNWEYVSQIINLTQTTSASYLLMSSLDISRRNLALRGKESFAKVAQMAEYARDEINSIGGFYAYGKDMVNGGSVYDFDVTKLSVYTRDIGLAGIEVYDLLRDEYDIQIELGDIANILAYISIGDRIQDIERLVGALADIKRLYSKDPAKMLNTEYINPKVLVSPQVAFYSQKESMPVRETAGRICGEFVMCYPPGIPILAPGEMITPEIIEYIVYAKEKGCSMQGTEDPEVENLNVLAKK

SEQ ID NO: 54 - protein, 2249 aa, Plasmodium ovale
MNTANDAMFYSANNFVYAVNFSENNPEKETKSMNEGNDCIPSSNALSEELGSVAERDEVASNDSICRNRNVSRNGNANSNIITNLSKNQSAIQSSINSAIHSAIHSSIQNSIQSSIQNVIPSTSRHHYKDAKDLSQKWKKEESYQIGSRRREKNRLKSSKYEKINVLERYINISNATNVCSLRIKLWEALMLYVNKLHLEFVYFILNCLEEIEVYWGEEATNNLQDILNLVNDKKYKDVLYKIGEILSSLSVTTSKSTEENPFFYTLIVSAKRDENNNNNNYNSDLSCELSKIIQYEHNRLSNQNNNKKLEYKIIEVSNAKEALLACLINSQILSVVLVDNLVIDEEFTKEKDYFPYIDDNALNNNCVNNSYLLNCNTTNSTQIKTPLSHNIGNNGGSPGNKDTVRGSLSSCRHNISNGQMCNHGQMCNHEHSRSSGSESKRQSSFLLKRDYKFEIGDFVLGYDQLVAAPLEKMKKGYNSLVILIKSIAYIRSSVDIFCVCTSITLDKLQSVNNKIIRIFTTHDDHSDLHESILDGVKKKIKTPFFNALKSYAERPIGVFHALAISKGNSVRRSRWIQSLLDFYGVNLFKAESSATCGGLDSLLDPHGSLKEAQIMAARAYGSKYCFFVTNGTSSSNKIVMQALVKPGDIILVDRACHKSHHYGFVLCQALPCYLDPYPVSRYGIYGAVPIYVIKKTLLEYRNSNKLHLVKLLILTNCTFDGIVYNVKRVVEECLAIKPDLIFLFDEAWFAYACFHPILKFRTAMAVADKMRSKEQKKVYYKIHKRLLKKFGNVNSLHDVPVDYLLKTRLYPNPSEYKVRVYATQSIHKSLTSLRQGSIILISDDNFESHAYTPFKEAYYTHMSTSPNYQILATLDAGRAQMELEGYGLVEKQVEAAFLIRKELSEDPMISRYFRILNAEDLIPDSLRQCAVSYMKRKNKIYSKEGSPSLSKCSDNVTYSCISNNIAKRATDQSENTKYRICHKKPNFSSCEGVHEVVESATGLGVTFSNDSHISNGFVSSGSGRYESCNPARGNRLREGHLREGRFQENHFSGNDPQMSRVTDGKKKKKKRNDISSVTHDDDNSNDSTNSENECFSIEESRENKNGNCSCNSSNYLNNFLEYFECSWLSEDEFVLDPTRITLFTGYSGIDGDTFKVKWLMDKYGIQINKTSINSVLFQTNIGTTGSSCLFLKSCLSLISQELDQKKTLFNERDLNQFNESVYNLVSNYIELSQFSGFHPLFKKRYSTSSIFNREGDLRKAFYLAYEEDYVVYILLLDLKERIKKKEMIVSASFIIPYPPGFPVLVPGQIISEEIVDYLSGLSVKEIHGYDENIGFRCFYNFILNYFYHIVTSDPYAYYQKMDKKTYDKLKLSSLNKKKNTDDIYHLYIYDKDRNKLKKIYLRNGRNASTDNNTTVSDSYEEVTSCSIPHIGPVRRCVPAISSVSAVSGGSAIGRIDAQKQCSEKEDNFCDVNGENGLSNDISSLNNSENTSPQKKSSTESIIKKGHYNESTMKGKKNLRKYISVPNNIRTDEYNVFLSKIKEGEFEIIGTPKNDNRNFLVNSANCYYNKKAKDLIRQTNGFKKIYKDHTHLCTEDNLIVDRDICNSSGSNGQNHFERKKNMIKNDLPLSNREEVGMEVENWEEARIGTANWEKVPNGEHLSNVVFKKHRGDVIFEEDRLSVRRTCNVGISHRLSGRRRGNVSTANPENAILQAGQVNAVRSKPGKGTGRGVGKNRNGIITERGNIPNGSITNKQNMLYSFSDVYSIRQVGKMNNKDGEKYDHILTDVVPKIKQSNIILYNKINNNSMLVQRKRLSNVNDYTCNLNEKNNHKEYRGKDFVCYSDSNKKNKNVMYVKHEEEYVKEESDQDINENIFEYNNKLFRVNRVIGKKEDDNGIGSTGVIRGHNIEMSRCLEFTQGQPTREEKKGRDMHSNVNSVSNVRNLTNGSSSMGNRIRAGIIGNRSRGRTRVKKQSNRSSMQEPLAHVSYLPEQNIKRNVEEMYIEGEPIRERDTEQNVFISKVPSERDGLNGKGLSHTHCPNEAKSHNYANENMCTDMNYVTKEGDMEGVVNGNAHEYPNEGSNGLVNVLANDNSSFKSSQKSSDSSNCRDEWGQMGDVHLNFVGNDQGHGKLNTQEKIETEICRSSFPFNEKELNKDPVLLENAGDRNSPRKLNTLNNNSYINNLITNVDDDTFVHKEGNFFLECAMTNSEINCSSFEMDMSLNNIYSHDGDGIGQHMHRGGDKKGEFK

SEQ ID NO: 55 - protein, 497 aa, Firmicutes bacterium CAG:345
MNKEKQNNTPFFSEMKKYIESDPTCFDVPGHKMGNFDNDLEEYAGKTLYKLDVNAPIGLDNLYHPHGVIKEAEDLLADLYNVDEALFSINGTTGGIMTMIIGTIDAKEKIILPRNVHKSIINSLILSGAYPIFVMPDTDPETGIANGVKIDNYIKAMDENPDAKAVFVINPTYFGVTSNIKKLAKEAHERNMIVIADEAHGSHLYFHEDLPLGAMAAGADISSVSLHKTFGSLTQSSAILINKERINVSRIKKVYAMLSSTSPNHILLASIDVARKRMALDGHKLLSNTLDLARKTRERINKIRGFHCLDKSYLDGNGRFDIDETKLVINTSEVGLSGFEIFKLMREVENVQMELGEISELLAIFTIGTTQKDADRLVEGLQKISDKYYDITDIKTIPHFSYSFPELIVRPREAFHAPSKVISLDDAVGEISAESIMIYPPGIPLAIPGEIITQNAIDLLHFYEKEGGVVLSDSPDGYIKVLDQDKWYLGSELDYDF

SEQ ID NO: 56 - protein, 451 aa, Cyanobium sp.
MFPRLSVSHPLALHLPAHGRGRGLTPALARLLRERPGSWDLPELPEIGGPLEAEGLVAEEQRACAALLGAERCWFGVNGASGLLQAALLALAPPGSRVLLPRNLHRSLLHACVLGQLQPVLFTPPFDPATGLWLPPRAEHLSRALLAALADGPLAAVVLVSPTYQGFGADLEALVPLVHGAGLPLLVDQAHGQGEALAAGADLVVLSCQKAGGGLAQSAALLAQGPRLDADALARALLWLQTSSPSALLLHSAAMSLRHPHSGAGRRQRSRALAIAAQLRRRLRALALPLVDGQDPLRLVLHTAALGINGLEADAWLLARGVIAELPEPGTLTFCLGTAPPRRVVWELPRALVGLRQALGGDPLPAFSPPPLPPVAEPEQPIATAWRAPAETLPLAAAAGRIAAEPLCPYPPGIPLLIPGERLDGARVVWLQQQQRLWPGQIADTVRVVRS

SEQ ID NO: 57 - protein, 108 aa, Shigella dysenteriae
MCWEGPFLPGDMTMNVIAILNHMGVYFKEEPIRELHRALERLNFQIVYPNDRDDLLKLIENNARLCGVIFDWDKYNLELCEEISKMNENLPLYAFANTYSTLDVSLNG

SEQ ID NO: 58 - protein, 487 aa, Eubacterium sp.
MKKDLLERLEEYCGADYVPLHMPGAKRNTQEFVMPNPYAIDITEIDGFDNMHHAEDILKEAFERTAKLFGAEESLWLINGSSAGLLAAICGATKKNDTVLVARNCHRAVYNAIYLNELNPVYLYPKEVTSGIYGAVSPSQVEQAFKQHENIRAVIITSPTYEGIVSDVKKIAEIVHRYGKILIVDEAHGAHFAFHEAFPESAVFCGADAVIQSIHKTLPSLTQTALLHLQGNIDKERVRRYWDMYQTTSPSYVLMGGIDRCMTVLETKGKPLFNAYVTRLLALRKKLEILTNIRLFPTDDISKIVLLVRDGKKLYQELLNKYHIQLEMASLQYVIAMTSIGDTDEYYERFFEALRQIDDEMQTKIRRGQKSQLQTEQNIKQRNELPTELENVEKITAFMECFPEVKCNPYDAQNGDAEPVELGLCVGRTAAAGVCFYPPGIPLIQAGEVYTGEIAEIIREGIQKNLEVIGIEKSEKGVYVSCLKSYF

SEQ ID NO: 59 - protein, 966 aa, Cupriavidus basilensis
MARSTARKAKTGQHISLNRYRSVWEMRADGWMNLTDDLGRLVNLARECKEFIERHARVKETLAMLEPIERFWAFPGHRLFEELTAWFEAGDLGRLNIAVHRINRMLASDTYRHKKLSLDAESEEPSEIETEEEMQAQIARPYFEVLIVDDMTREDEEALRRRVQRKQRVDDPFVWDVVVVPSFEDALIATLFNFNLQACVIRHGFPFKSEYELDLLRKFLEGLDEGIEEQPESERGPLLGQKIAQLRPELDLYLVTDVKAEEIASRLGEVFNRIFFREEDHTELYMSIMKGVSERYKTPFFTALKEYSKQPTGVFHALPLARGKSIMNSHWIQDMAQFYGLNLFMAETSATSGGLDSLLDPIGPIKVAQEYAARAFGARRTFFATNGTSTANKIVVQALVKPGDIVMVDRNCHKSHHYGMVLAGAKVAYLDSYPLNDFSMYGAVPIAQMKRTLLRFKRAGTLHKVRMVLLTNCTFDGVVYDVKRVMEECLAIKPDLIFLWDEAWFAFARFHPTYRQRTGMDSASRLRRELDSEDYRQRYDAFTASFGGADWDDEEKLVATRLMPDPDRARVRVYATQSTHKTLTSLRQGSMIHVWDQDFKDKAEEAFHEAYMTHTSTSPNYQILASLDVGRRQVELEGYELVQRQMELAMTLREWIHTHPLLKKYFQFLNVSRVVPTAYRPSGIEAYYSPESGWANMEAAWRVDEFALDPTRLTLSIGTSGIDGDTFKNKYLMDKYGIQINKTSRNTVLFMTNIGTTRSSVAYLIEVLIKIARELEERTADMSVIERRLHEKRVSSLTRELPPLPDFSHFHFAFRSVCNSGQIETPDGDIRKAFFMSYDEENCEYLNMAEVAKAISKGREVVSALFVIPYPPGFPILVPGQVISSEILEFMQALDVREIHGYRPELGFRVFSDGALQQLALQAAGEAAAAVAAAAKASVSAVVEVSTATVDEVAAAALADRPAAKK

SEQ ID NO: 60 - protein, 475 aa, Salimicrobium jeotgali
MTRHEKAPLWEAVKQYRHGKAGSYHVPGHKNGTVFDTEAREVFREVLEMDTTEIPGLDDLHSPRGAIKEAEELARLYFKSEKTRFLVNGSTSGNLAMILAVCRRGSPVLVQRNAHKSILHGIELAGAKPVFLAPEWDARTGKYSSLTPERVREGLRQFPEAVAVIVTYPDYFGHTFNLSAITSLVHEAGKPVLVDEAHGVHFSLHRDFPDTALAAGADIVVQSAHKMAPAMTMGAYLHTQGPLVPEKRLSYMLQVVQSSSPSYPVMVSLDLCRRYMAMWKEDGLLTFLDEVREELDACCDGWEVLPASPQDDPLKVELKPRRVDGFTLASMLEEQGIYAEMATNTGVLLTFGLERPESWENDKAAFYEVARLLQKREKHDKIIDNNISFPPVQQLDAQYEEMEDLQQTCLPLENAVEHIAAEAVIPYPPGIPLILKGERIRQEQVEHIRTLIENKAVFQNENIEKAVTIFQEEWS

SEQ ID NO: 61 - protein, 761 aa, Serratia proteamaculans
MKALLVESEFTTPGGYPTAAIGRLIEQLNGRDVEVMRATSLQDGESIIDANEPIDCLLLARSMPDKKAADPAQKLLDKLHERQENAPVFLLSDRGTVTKELSLDMMEQISEFAWILEDSADFIAGRIMAAIRRYRQLLLPPLMSAIMKYNQTHEYSWAVPGHQGGVGFTKTPAGRVFHDFYGENLFRTDSGIERTALGSLLDHTGSFKDSETNIARVFGAEKSYSGVVGTSGSNRSVMQACLTEDRGAVVDRNCHKSIEQGLILTGATPTYMIPSRNPYGIIGPVPKSEMLPDTIKTKMDENPLGITSIDYFVLTNCTYDGICYNAAEVVNVIEGKGTFIPVVHFDEAWYGYARFNPMYNNYFAMRGDPKDHTSDLSTVVATQSSHKMLNALSPASYIHIRNGKKPLDFPRFNQAYMMHTTTSPSYIIAASNDIAANMMDGESGQSLTQEAINEAVDFRQALARLHTEFKAKEEWFFKPWNIEKGRKPGEEKDVPFQDIPAEALATDQSYWVMKPEDKWHGFKNLDADWAMIDPVKVSILAPGIKVDGTLEDTGVPAALVNAWLARNGIVPTRTTDFQLMFLFSMGVTKGKWGTLLEALLSFKRHYDANTPLSEVLPDLAAKYSAEYGALGLKDLGDKMFAFLKQDDLGKLLNQAYDALPTPVLTPRAAYQKLVRYDVEPVSLKDLHGRIAANAVLPYPPGIPMLMSGEKFGERVGDKESAQIAYLLALQKWDDTFAGFEHETAGITITDKGEYQVLCIKS

SEQ ID NO: 62 - protein, 474 aa, Sporosarcina ureae
MKYQDRPLVQALQNFHDRSPVSFHVPGHKGGALSDLPVAVRQALAYDLTELTGLDDLHEATGAIKEAEDKLACLYGSEQSFFLVNGSTVGNLAMLYATVQPGDLVMVQRNAHKSIFNALELTGANPVFLSPDWDEQTQTAGTVSLKTVKEALAQYPDVKAAVFTTPTYYGIINRDLRQIIEVCHSYSIPILVDEAHGAHFIVHDAFPKSALELGADLVVQSAHKTLPAMTMASFLHIRSKFVKVERVAHYLQMLQSSSPSYLMMASLDDARYYAETYDEKDYESFQIYRNNLIQGLCNIARVEVVRTDDQLKLLIRAAGHTGYVLQEALEQQGIYPELADLYQVLLVLPLLKAGDEESCVDLVDQFKVAMDCLAEKETTSMRFNNFTSNSSPSSVVYTANQLHTMDIEWVSMQSAIGKVAAAAIIPYPPGIPLLCAGERINQEHMVQIYDLLMAGCRFQGAINREKKQIKVVFE

SEQ ID NO: 63 - protein, 2262 aa, Plasmodium berghei
MDSPNNAMVCGEDNTMYGNNMFENRNIENDYMNTNNSTMGVDTESGVYLDKEGKNPFYIYPYNLKQNRSAILKMMRRKNKYENIDLLEKYININNATNVCSLRIKLWEALMLYVNKVNVELIYFIINCLEEIEVYWGEEAKNTLQDIISLINDKKYKEVSNKIGEVLSSLSVTSGKINDDSPFFYTLIVSGKREEYCNNNLNINNNNISMNANNNYNSNNNSGNYFNSDLSYELNKFLQYEQNRFSNQNNNKKLEYKIVEVNNAKEALLACLINPQILSVVLVDNLIIDDETKNDSNNNNNIFFNFNENSSLNKNYLMNYNIPNNFKVKQNMCCSNIMNKGVLSCGASNNDHIKTSEKKSRNSRDDINSNDDETTSINCINRDENRNDDRNSSSSGWNSIQNNIPNTGDKNLKRNRIFLKNDYKFDIGDFVLGYDQLVSAPLEKMKKGYNSLVILIKSIAYIRSSVDIFCVCTSITLDKLRSVNNKIIRIFTTHDDHSDLHESILDGVKKKIKTPFFNALKLYAERPIGVFHALAISKGNSVRRSRWIQSLLDFYGVNLFKAESSATCGGLDSLLDPHGSLKEAQIMAARAYGSKYCFFVTNGTSSSNKIVMQALVKPGDIILVDRACHKSHHYGFVLFQALPCYLDPYPVSRYGIYGAIPIYVIKKTLLEYRNSNKLHLVKMIILTNCTFDGIVYNVKRVIEECLAIKPDLIFLFDEAWFAYACFHPILKFRTAMTVAEKMRSKEQKKLYYKIHNRLLKKFGNVKSLNDVPSDTLLKTRLYPNPTEYKVRVYATQSIHKSLTSLRQGSVILISDDNFESDAYTPFKEAYYTHMSTSPNYQILATLDAGRAQMELEGYGLVEKQVEAAFLIRRELSEDPMISRYFRILNEDDLIPDSLRQCCIAYMNGGNTSTRSGKKKHIRRKKIKKGKQNRDEEKENDNERKQYDEINIQKQFFMDHDSYSSRYNSANASYSCISSKHAKGGISEPFGNTKYNAHSNNSNNIPSFECINQGYSGSIYVKKTLGNNAYASNDLPTDTIIANRNNGENETNNIKKYNYKNDERSINGADTINCTSNFENDQYIDRKMRNEVEKKCYEDNATKKMNKKKNKKNESYKDINSITNDSSSSFGANDVKCVCVDCMKSENIDEVNDEIRSRCCNSESSGDCDESDIYDKDKLCSKSNSINNFLEYFECSWLSEDEFVLDPTRITLFTGYSGIDGDTFKVKWLMDKYGIQINKTSINSVLFQTNIGTTGSSCLFLKSCLSLISQELDQKKALFNERDLNQFNENVYNLVYNYIELSQFSDFHPLFKKKYRNMDGKNNNIFNKEGDLRKAFYLAYEEDYVEYILLADLKERVKHNGMVVSASFIIPYPPGFPVLVPGQIVSHEILDYLSGLSVKEIHGYDENIGFRCFYNFILNYFDNSIISDPYGYYQKIDKKLYDKLKRESLRQEKQKNIENSYYIYVYDNKKNKMKKLYLYNGNTVSSDKSIIADNFMDDEGTNYSIVCSDANNGTVFLNNNTPSLINTNNMRKNTNINSKNINNSPTSEIPYHDNDEDMHKGDNKNLNTIPSNCIYMKNKMNNEQECLCKTGLNSNVEKNYDEKNIDSIHFRKNMGNDKSSPKNNVHKMHPVNEKKKTYGHILKKNSNKKYILKGKEMKRYYCLSNEKKNNKYNILLTKMKNNDSEIPKNEMCLNNNSFTNIQNHHFDHKTNHLIRKNYFHDNTYNKSEQNNKNFDVSVNMKREDHYGVNADNNNNENDCHNNITLGNTPKNIETDNIHYSRTSISNNEDSKNTENEENNAKSEFASVQNTSTNIKCCINNRNTSCLANGSKENFNKMCEYMQGNYQNTNANSLLDIHYMKKNSKFNKSDDGKYKKKNNSHCLNKKMNTSNIIMSMKTTKKDLLIEYRNCLNGKDEKLNNDRVLNNYVRNSEREKTNYSDYSNSNKRLNKIIYGKSDGENIQKEMNNVTNENSYEPNNKLLNKDNICFNRREENYNNDNENNNEKENYDIVSTNCVTKDMQELNEGNVNPNNYSSGNRTDSVMNIEKLNCHNNCCSEKSGRKNSQEICRKMIEENDENNADRGNKNSVRKMNICDCSNNEETENNRNCNNIKCGQNNLNQSNTLCCKQDDEYKNEDDSSNEGYVNINNVHIKSEIKFCVNNFHLNENDIQVSPIIVEKDIDKNPNRKLNTLNNNSYINNLITNVDDDTFIHKEGNFFLECALTHSEINCSSFEMDIPLNNVYYNGDNNDTKECRNYEGDKQTNF

SEQ ID NO: 64 - protein, 710 aa, Aeromonas veronii
MNIIAILNHLGVFFKEEPIRQLQASLERKGFEVVYPVDVADLLKLIEKNPRVCGAIFDWDKYSLGLCKEIHDRNEKLPIFAFANDQSTLDIHLTDLRLNVHFFEYRLGMADDIALKMGQATQEYQDAILPPFTKALFKYVEEGKYTFCTPGHMGGTAFQMSPAGSIFYDFYGPNAFKADVSISMPELGSLLDHSGPHKEAEEYIARTFNADRSYIVTNGTSTANKIVGMYSAPAGSTVLVDRNCHKSLTHLMMMNDVTPIYFRPTRNAYGILGGIPQSEFSRDTIAAKVAATPGAQAPRYAVVTNSTYDGLLYNTGFIKEALDTPYIHFDSAWVPYTNFSPIYEGKCGMSGEAMPGKVFYETQSTHKLLAAFSQASMIHIKGDVEEETFNEAFMMHTSTSPQYGIVASTEISAAMMRGNTGKRLIKDSIDRAISFRKEIKRLRDQSEGWFFDVWQPDNIDTVECWKLDPKDDWHGFKEIDDNHMYLDPIKVTLLTPGMGRDGQLLEKGIPASLVSKFLDERGIVVEKTGPYNMLFLFSIGIDQSKAMQLLRALTEFKRGYDLNLTIKSILPSLYREDPSFYEGMRIQELAQRIHELTSKYRLPELMFKAFDVLPEMKMTPHAAWQQELAGNVVEVPLRDMVGRISANMILPYPPGVPLVLPGEMVTQDSLPVLEFLEMLCEIGAHYPGFETDIHGLYRQADGSYTVKVLR

SEQ ID NO: 65 - protein, 759 aa, Ralstonia solanacearum
MKFRFPVIIIDEDFRSENISGSGIRALAQAIEEEGMEVTGLTSYGDLTSFAQQSSRASTFIVSIDDDEFINPDNDKPEPEAVENLRAFVAEVRRRNADIPIFLYGETRTSRHLPNDVLRELHGFIHMFEDTPEFVARHIIREARNYLDSLPPPFFKALIDYAQDSSYSWHCPGHSGGVAFLKSPVGQVFHQFFGENMLRADVCNAVDELGQLLDHTGPVAASERNAARIFGSDHMFFVTNGTSTSNKMVWHANVAPGDIVVVDRNCHKSILHAIMMTGAIPVFLMPTRNHFGIIGPIPKSEFEPETIAKKIADHPFASQAKNKKPRILTITQGTYDGVLYNAEMIKNMLSTEIDTLHFDEAWLPHASFHPFYENMHAIGHGRARSKDALVFATQSTHKLLAGLSQASQILVQDSETRKLDTYRFNEAYLMHTSTSPQYSIIASCDVAAAMMEAPGGTALVEESIAEALDFRRAMRKVEQEYVGTNGGSGRGDDWWFKVWGPNDLSDEGIEEREAWMLKANERWHGFGDLAEDFNLLDPIKATIINPGLDVDGKFSESGIPAAIVTKYLAEHGIIVEKTGLYSFFIMFTIGITKGRWNSLVTELQQFKDDYDNNQPLWRVLPEFVRQYPQYERIGLRELCDGIHSVYKANDVARVTTEMYLSNMEPAMKPSDAWAKMAHRETERVAIDDLEGRITAILLTPYPPGIPLLIPGERFNRTIVQYLQFARDFNKLFPGFETDIHGLVEEEIDGKVGYFVDCVR

SEQ ID NO: 66 - protein, 752 aa, Taylorella equigenitalis
MKFRFPIVIIDEDFRSDSASGFGIRALADAIEEEGWEVLPATSYGDLTSFVQQQSRASAFILSIDDEEFESDSPQDVAEAIRNLRSFINELRFRNEDIPIYLHGETRTSEHIPNDILKELHGFIHMFEDTPEFVARHIIHEAKSYLDTLAPPFFRELVSYAHDGSYSWHCPGHSGGVAFLKSPVGQMFHQFFGENMLRADVCNAVEELGQLLDHTGPVAKSEINAARIFHADHCYFVTNGTSTSNKIVWHGNVAEDDIVVVDRNCHKSILHAITMTGAIPVFLRPTRNHLGIIGPIPLSEFEPENIKKKIEDNPFISDELKKKPRILTLTQGTYDGILYNVEMIKEKLGDTMENLHFDEAWLPHAAFHEFYTNMHAIGANRPRSKEAIIYATHSTHKMLAGISQASQIIVQDSESRKLDRNIFNESFLMHTSTSPQYAIIASCDVAAAMMEPPGGTALVEESIRESMDFRRAMRKVASEFGKDDWWFKVWGPPRLVQEDIGWQGDWLLEPDADWHGFANITEGFTMLDPIKTTIVTPGLEIDGTFEESGIPASLVSKYLTEHGIVVEKTGLYSFFIMFTIGITKGRWNTLLTSLQQFKDDYDKNQPLWRSMPDFIKQYPMYESFGLRDLCQKLHEAYHHRDLARITTEVYVSEIESAMRPKDAYNKMTRRQIERVDINELEGRVTAVLLTPYPPGIPLLIPGEKFNKTIVQYLKFVCEFNVEFPGFETMVHGLGTETLPNGEIHYYVDCLID

SEQ ID NO: 67 - protein, 607 aa, Unknown
  Description of Unknown: Candidate division TA06 bacterium 34_109 sequence
MNLINYDLIVVTDDKKKKAKYNFLNGEEVLFNHTRFRIRLINKFIYSETGLDRLMYDGVIVDVKQFEDDIINTLLFYNNQSEIFIFDYKFKPNIANRNTKYFYELSHLKDLIIQFFYERRYNTPFFNALKRLARSKKQRWHTPGHVGGEAFEKYTSVRDFKRFYKNNIFLTDTSVSDPSFGSLLSHNSVFKEAEKLLSTAYGTLYSFINVHGTSTSNKIIFMTLLDKGDKVIVDRNIHKSTIHSIIVSGALPIFLKANFNREFGIILPTRKEEVLRCIEENKDAKLLALTVPTYDGLRYNLPEIISLAHRYKIKVLVDEAWGAHMHFHHDYYPDALQSGADYVVQSTHKVMGAFSQASVIHVNDKDFKEKKYEFFENYMFFSSTSPFYPIVASIDVSRKLLSCEGKMILEKVKKYYEQLVSEIDALNDFKVLKRSYLKDYYQDKNEILLDYTRILVNFSKAGIGKKQIYSYLLKNKIVVEKINYNSFTLLLGVGTTQNMVKRLIKVLKDFKYEKRDLEEKSIQFIWNDLEATIPPFEAYQSKGEWIELKNAKGRISSNMLVPYPPGIPLIIPGQIFTEDLINNLLEITSFDEIEIHGLIKGKVKVLK

SEQ ID NO: 68 - protein, 2415 aa, Plasmodium falciparum
MKLSNDPNFQIDEDSLHMNNIDQNKIEEDVIPDSKAVSDYNVNNQEVQRKSLSLKEDEKMRINSVGVYKVKREEYKNNMHPRNVQQKNINQMYKQYKNINTKVYDENIEYHRKNYEENLYGSTKYDRIEELENYININNVTSVCSLRIKLWEALLLYVNNLNVEFIYFIISCLKEIEVYWGQEATENLHEIINLINDKKYKEVSNKIRETLSSLSVTTGKITDENPFFYTLIVSSKRDENRSNSTNNYSDLTCELNKILQYEHNRLSNQINNKTLEYKIIEVSNAREALLACLINPQILSVVIVDNLNIDEERVEEKDIYNYYNDENNSVRNHSVANSYVYNSSIVNNVHMPINKSNMNNIALNALALNNKDIYMKGMMGTSRHHNNNNNNNNNNNNNNNNNNNNNNNNNNNNNNNNNSGVNDFRKNKSYNYSNNYINNNMNLNKYNDSNKKNIINNVNNLNNMYNLNNMYNMYNICNINYNNDNICHHQFKEYKFNIADFVLGYVQLVSAPLEKMKKGFNSLVILIKSIAYIRSSVDIFCVCTSITLDSLQSVNNMIIRIFTTHDDHSDLHESILDGVKKKIKTPFFNALKAYAERPIGVFHALAISKGNSVRRSRWIQSLLDFYGVNLFKAESSATCGGLDSLLDPHGSLKDAQIMAARAYSSKYCFFVTNGTSSSNKIVMQALVKPGDIILVDRACHKSHHYGFVLSQAFPCYLDPYPVSKYGIYGAVPIYVIKKTLLEYRKSNKLHLVRLIILTNCTFDGIVYNVKRVMEECLSIKPDLIFLFDEAWFAYACFHPILKFRTAMTVAEKMRSTEQKRIYEKIHKKLLKKFGNVKSLNDVPEEELLKTRLYPNPNEYKVRVYATQSIHKSLTSLRQGSVILISDDNFESHAYTPFKEAYYTHMSTSPNYQILATLDAGRAQMELEGYGLVEKQTEAAFLIRKELSEDPIISKYFRILNADDLIPDRLRQCTVSYMKRKHVNNNNNKKKNNGDDDDNDDDNNNDDNNNNDDDNNNDDDNNNDDDNNNDDDNNNNNDINHDNNHNNHNNVGNQKKYNNSLNSRCSADEDATGSYIFNNNIKEIEDNTESAHKIPIEYVDGKLFNVIKYPHEYMSEDNSPNNIHTNLQKSNMKLLNDNNIEVGRILESSNCFKYSHNVNMCNVLINNSSYRNNSDNKKDGSEKRYVYDEYNESVKEYSPNDDTNYDATYKGYVNGHVNVNMNNLMNGDNKCDWYDTNDCDDNKNIYCDKANNIYYYGNNYKSKEEKRKKANYGSVNSICCDSTYCMDTSDDNLSSNECSSYIDNNNNNNNNNNNINNNSNNNNSCSGDMKNFLEYFERSWLSEDEFVLDPTRITLFTGYSGIDGDTFKVKWLMDKYGIQINKTSINSVLFQTNIGTTGSSCLFLKSCLSLISQELDQKKSLFNERDLNQFNESVYNLVYNYIDLSVFSAFHPLFKKRYEDKNIFNNEGDLRKAFYLAYEEDYVEYILLNNLKDRIRHKEMIVAASFIIPYPPGFPVLVPGQIISEEIVNYLSGLSVKEIHGYDENIGFRCFYNFILDYYETININDPYSMYQPMDKRLYEQLKEKYLHSKKDLHDHRLSNLYMYDKETMKMKKVYIHNNGSYSVDPYGYISDLNEEEGVIINAQHVNNKKDIFFHNKRENKIHNNNNNNNKKKTHVNNKSDVMIIIPSEDHLNPHIIHKMSDNNRKIINTKNYNNIINYTSNILNNKQDHAFYNSGSPRTSVCSNHKNINTNGMFNNLMHKNDERGNNKSMSKHEKNNHSLYLTNGVNTKSHKKMYIESYNPKGDRELDFQNKSTMYNNMDDVAYHGKHYHSVKKDIINNDTSLKENRYNKNIMSCKTNNNTGTNSKNERKKKKSFGIHMSLSPNNNHLKGHDTSRYSDSTSICEDNINDDNIDDTGHKKMDAIDGHNIRNKKSDIKEILYNNNDNDIYGNACDVIACKENMYINEKDSYSDVVLIKRNNKINKNDGNYYYHNNFSNNSKHSNVVPILNKGNVLLNNTNVKKNDYCVIQKDNKIMSRNNMSTKYASSNEYNKKKEEGAYYSDSSKNIHDNLFLKRKENENIEHITKDVMKKPLIGYNKEEIKKINEFLKINRRIADEHMGDIQIKLDEEILERKEEDMYDNKNDMFNVNIKSNIEDVADNSPQMNIDKKDIIVLASNNNYCDINNNNNNNNNCNYVKKCETNKCDIYITKDNLEEIQKTNMNIKKDVEHDIGEYNFDSVINQSVNNNINILIDKYNCNNIKKLNNSNICENNNLLSNDNNYIVNHKVYSSIENTNTLNCNNIKTDNNSNNNNNNMPYKENKVRGLIICENDINKNTGRQLNTLNNNSYINNLITNVDDDTFVHREGNFFLQCEFTNSDINCNMYEMETSLNNICTNLGGVIIKNNMEYDDCETKHK

SEQ ID NO: 69 - protein, 411 aa, Oligotropha carboxidovorans
MVASPSCDMAGFPGSEIISLSGSSQGRWESAMTDRIQEFLRDRRSKGLDTEPCLVVDLDVVRDNYQTFAKALPDSRVFYAVKANPAPEVLTLLASLGSCFDTATVPEIEMALAAGATPDRISFGNTIKKERDVARAYALGIRLFAVDCTAEVEKIARAAPGAKVFCRILYDCAGAEWPLSRKFGCDPEMAVDVLDLAKRLGLEPVGISFHVGSQQRKVKAWDRALAMASQVFRDCAERGINLTMVNMGGGFPTKYLKDVPPVVQYGRSIFRALRKHFGNQIPETIIEPGRGMVGNAGVIEAEVVLISKKSDDDENRWVYLDIGKFGGLAETMGESIRYQIRTRHDGAEMAPCVLAGPTCDSADVLYEKAPYPLPVTLEIGDKVLIEGTGAYTSTYSSVAFNGIPPLRTYHI

SEQ ID NO: 70 - protein, 511 aa, Synechococcus sp.
MVLSHLSKASRRLRLLDRKAQERAPLFEAIRHYCSLDKAPFHTPGHKQGRGIPADLRAFLGENVFRADLTELPEVDNLHDPDGVIREAQELAAAAYGADRSWFLVNGSTCGVETLVMAVCDPGDKILLPRNCHKSAIAGVILSGAVPVYIEPDFDLELGIAHGITPAGLERALAEHPDAKGVLVVSPTYYGVCCDLEALAAIAHAHGLPLLVDEAHGPHLGFHPELPLSALEAGADLVVQSTHKVISGMTQASMLHLKGSRIDPNRVRNILQLLQSTSPNYVLMMSLDVARRQMALEGEVLLGQTLTLADQARARLNRIPGIFCFGPERIGSTPGFFDLDRTRLTVTVSGLGLFGFDAHDWVNDHFHVQPEMSTLHNVVFIISLGNTQRDIDRLVESVAALSEQAQGSQPSLALAEKLRRLAQLKRPPLPPQRLSPRQAFFAPIERIPFQEAVGHICAEIISPYPPGIPILVPGEEVTQEAVDYLLLVHEAGGFINGPEDVRLQTLKVVKT

SEQ ID NO: 71 - protein, 537 aa, Paenibacillus alvei
MDKHKETSQLALAGQEHVRAPLVEALLKYNQNQHASFHVPGHKDGKWYAHESLSLSGREDWNTLLHKMSLLLTIDVTEVEGTDDLHHPTEAIAEAQQLAAQCFGAEETHFLVGGSTVGNIALLMSCCIQPNDVVLVQRNVHKSVLHGLMMAGARAVFLAPQMDKGSGLATAPNNDTVEQALQAYPNAKALFVTNPNYYGMGINLCELAEMVHRYDIPLLVDEAHGAHYGLHPAFPESALQAGADGVVQSTHKMLGGMTMSAMLHVQGARLNRTRLKKLLTMLQSSSPSYPLMASLDISRYYLARNGREAFEEGLKAVQHVRAALVNLTVYEVIEIQTAKPQSAYCSLDPFKVTIRCTNGQLSGYELLERLSEYGCTAEMADLQHVVLSFSLGSSLEDAQRLITALQAVAVTLDDNTPYTKIQVATYTENIDTPGRSITFADGQRMYSEPVSFSIYEQESVRTKRVSVHEAVGHKAAESVVPYPPGIPLLYPGEIITEAAAQELIMLAHAGAKCHDAEDESLLTVRVVVTEDEKGIED

SEQ ID NO: 72 - protein, 711 aa, Plesiomonas shigelloides
MNIVAILSNVDAYFKEAPLQELDIELQKRGFHVIYPSDAADLLKVIENNPRICGVIFDWDKYGLDLCKDISAINENLPLHAFANNNSVLDIKLGHLRLNLSFFEYHLDIADDIALKIGQKRDEYVDRILPPLTKALFKYVHDGKYTFCTPGHMGGTAYLKSPVGSIFYDFYGANTLKADISISVAELGSLLDHSGPHKEAEEYIARVFNADASYIVTNGTSTANKIVGMFSAPSGSTVLIDRNCHKSLTHLMMMSNVTPIYFRPTRNAYGILGGIPQSEFKRETIEAKIKTTPNAQWPIYAVVTNSTYDGLLYNTGFIKDTLDTKFIHFDSAWVPYTNFHPIYQGKYGMSGGGIPGKVVYETQSTHKLLAAFSQASMIHIKGDVDKEIFNEAFMMHTSTSPHYGIVASTETAAAMMKGNTGRALIDASVQRAVRFRKEIKKLRAESDTWFFDVWQPDEIQDAECWNLSPNDKWHGFKDIDADHMYLDPIKVTILTPGLDKDGNLEETGIPAALVSKFLDEQGIIVEKTGPYNILFLFSIGIDKPKAMQLLRGLTDFKRGYDLNLKVKTMLPSLHADSPHFYKDMRIQELAQGIHKLTIKHDLPKIMFHAFEVLPQMVIPPYQAFQEVLQGNTVEVPLEDMVGKINANMILPYPPGVPLIMPGEMVTEESKPVLEFLKMLVEIGRHYPGFETDIHGCHPHDDGRYMVSVLKR

SEQ ID NO: 73 - protein, 461 aa, Alkalibacter saccharofermentans
MKSRLYLNIESKRKNANFHMPGHKSRDFTKLGWEYFDTTELEGTDNLNNPQKEIREIERQISKSYASKECIISVNGSTSLIMAGIMGSCREGDCVAVARNSHKSVFSAIYYGRLKTLFIDPVLDPIYGYPVGIDLKHLEAELRKTRVRALVMTYPTYYGTCDDLNAVKHICDSHDVLLIVDEAHGAHFKHSMEFPPSSIDIGADITIHSTHKILSSLNQGAVLHVKSDRVDMENIRRHMAMLQTSSPSYPIILSVEEAVKFMNENGEKKLEKIQGFYERVKKALEGTKFTLIHDKISREILQVDKAKIWLAPGGVGKILAEDYNIDIELDDGKTALCMMGVGTVIEDVDRLITALKDISEKGLFKDSLEDSKRALFPKAGNKVMEAWEIDRMKKRMVSIKKAAGKVSASYLVPYPPGVPVVCPGEMVSDAAADYLYSMKEGSVDGMIEDKMIYILDEEQTL

SEQ ID NO: 74 - protein, 762 aa, Stenotrophomonas maltophilia
MYFKSLDYPVIVIDNDYESPRIGGILIRALVEELRSNDQRVLCGLNLDDARAGARTYVAASAVLISIDGSEEVDGEFQRLTAFLREQSARRANLPVFLYGERRTIEKVPSKLLKYIHGFIFLFEDTKSFISRQVMRAAEDYMKNLLPPFFKALIHHAAESNYSWHTPGHAGGVAFTKSPVGRAFHQFYGENTLRSDLSISVPELGSLLDHTGPIKDAENEAARNFGADHTFFVTNGTPTANKIVWHGTVARGDVVFVDRNCHKSLLHALIMTGAVPVYFTPSRNAHGIIGPISLDQFTPESLQQRIAANPLASQAYKAGSKPRIAVVTNSTYDGLCYNAEKIADEIGSAVDFLHFDEAWYAYAAFHPFYENHYGMAKGKPREQDAIIFTTHSTHKLLAAFSQASMIHVRNSAQRNLDAERFNESFMMHTSTSPHYGVIAACDVASKMMEGDAGRSLVQEMHDEAIAFRRAMLHVRDDLGRDDWWFSVWQPTQVERSLDKGDTPAPLVAKREEWYLQPDAHWHGFENLVDDYVLIDPIKVTLLTPGLAMDGSMGKLGIPAAVLSKFLWGRGITVEKTNLYSVLFLFSMGITKGKWSTLVTELMAFKELYDRNAPLSQALPTLAADYPNAYAGWGLRDLCDALHAFNQEFAVAKVMREMYVDLPTPVMTPADAYNHLVKGEIERVDIEQISGRIAATMLVPYPPGIPTIMPGERFGDSDEPIIQSLRIAREQNARFPGFESDVHGLIIEQEGDAVSYKVEVLKA

SEQ ID NO: 75 - protein, 468 aa, Alicyclobacillus sp.
MDETPILRQLLGAAQAERLSMHVPGHHSGRDMPALLGQWLQSALRIDLTELPGLDNLHDATGSILASQKLAASHYGSQGCYYSVNGSTACVMAAIFASVDERHRDVVVAGPFHWSVWRGAQLARAKLWRLAPVWDENRLEMLVPPPEAIANWLADQAQSHSWAAIVVTSPTYTGRVADIDAYARLAHEYNCPLIVDEAHGAHLGLVTDLPPHSVQQGADIVIHSAHKTLPALTQTAWVHHQGSLLSAERLKSALSFLQTTSPSYLLLASLDVAQAWLRCEAAGDVLQLQQHLSMLDRWRNVSDADPLRIWIPTGSTKRAQLLTEALEKENIFAEYVNVAGGLLIPPYHLSQRDTVRLEALLVRWQLESGDLDPKLLAILQAVAECTPQKCLDTADHFPPQETCVVWQSGHSAVGRISAACVIPYPPGMPILLPGDEIRREHVELVAYLEASGAIPVGCKPGCQFPVLS

SEQ ID NO: 76 - protein, 368 aa, Plasmodium vivax
MQTIEAMGTVGGMDPLGAPGPVGTAETPQEEEEMKEEGQILKSDTEESDDGQVEVKEIYNKSNFINGKGARLVRIVSEFVGVQDALRDEGIFFTVVVFGSSRSLSNEKYQSRKKKLEKKLSKLNDLITKSIPLTAMEVAEYERVKKDLEKLHKLKWTTDYYVKIYELSKRLTLFFGTEEGQKAVNNISTHLPKVHSFLPNKKGEKNPNNFTVAICTGGGPGFMEAANKGSREANGRSLGFMVSLPFEKGANQYVDQNLSFKFHYFFTRKFWLVYLSLAFIILPGGFGTLDELMEILTLKQCKKFKRNVPIILFGKDFWSSILNFKKLADYGLISQEDLDSIFLTDCIEEAYNYVINHLKSGSCVADMA

SEQ ID NO: 77 - protein, 483 aa, Bacillus subtilis
MVNLNQQDLPLVNALKALAQQPDTPFYAPGHKRGQGISPSFKQWLGPNLFQADLPELPELDNLFAPTGAIAKAQELAADLWGAEHTWFSVNGSTAGIVAAILATCGDGDKILLPRNVHQAAIAGIIHAGAVPIFLEPEVNPDWDLALGVTEETLSKALQEHDDAKAVFLLNPTYHGVVGDLQKLIKLSHRVNLPVIVDEAHGAHFAFHPSLPRPALELGADIVIQSTHKMLGALSQCAMIHGQGNLINPPRISQCLQLIQSTSPNYVLLASLDDARHQMANGGREKMAELLNFTLHYRQQLSQIPGLTLLEITKPLPGALILDPTRITVDVTAWGMSGFEVDDLLREKFQITAELPTLRQLSFIVSIGNQAQDLGHLLEALTQLAPTNPQQPFHLTLPVLPGTILAMTPRRAAHAAQKSVTVNEAIGKISAGLLCPYPPGIPVLVPGEIITPEAIAFLTEVLNLGGTISGLASEELTHLAVVN

SEQ ID NO: 78 - protein, 480 aa, Bacillus licheniformis
MKTPLYTALVNHAEGHHYSFHVPGHHNGDVFFDEAKTFFETILKVDLTELTGLDDLHEPSGVIKEAQDLVSRLYGAEESFFLVNGSTVGNLAMILAVCQPGDTILVQRNCHKSVFHAIELSGAHPVFLTPEIDEAMAVPTHILYETVEDAISQYPHAKGIVLTYPNYYGHAVDLKPIIEKAHQHDISVLVDEAHGAHFVLGHPFPQSSLKAGADAVVQSAHKTLPAMTMGSYLHLNSGRINRDRLAYYLSVLQSSSPSYPIMASLDIARAYAEDILKTNRTADIEKELINMREVFSQINGADIVEPADARIRQDPLKLCIRSAYGHSGFELKSIFEANGIHPELADERQVLLILPLEGKNMPAPELISTISKDMKDTAVRNDLPAGIGIPSEKVTALPYRKSKLSAFKKESVPFTEAAGRISAESVTPYPPGIPLIMAGERITKETISRLTRLVDLNVHIQGSNQLKQKQLTVYIEEEKS

SEQ ID NO: 79 - protein, 480 aa, Anoxybacillus flavithermus
MDQQRTPLYTALKRHDSIHPFSFHVPGHKYGIVFPKEAKDDYKQLLKLDATELSGLDDLHHPESVIAEAQSLAAKLYNVEATFFLVNGSTVGNLAMIFAVCGEKKKVIVQRNCHKSIMHALQLVGATPVFLPPEFDEDVRVASYVAYETIKKAIELHQDAAALVLTNPNYYGMAVDLTEVVNIAHRYRIPVLVDEAHGAHFVLGDPFPKTAITCGADVVVQSAHKTLPAMTMGSYLHVNSSLIDKEKLKYFLQVFQSSSPSYPIMASLDLARSYLARLTRKDIEDIFKQIQQLKDALDEIEGIAVVHSQHPFVKTDLLKITIQTRSQLSGYELQQRLEQEGIFAELADPFNVLLVYPLAVVERLEEVIKKVKRAFHGLSYSEELLHSFRAFSFSASSAAISYKELQTLPKKVIDLEKAEGFIAAETITPYPPGVPLLFIGERISREHIEQIKRLKSYHARFQGGKFLSSDQIEVYSTSKK

SEQ ID NO: 80 - protein, 445 aa, Staphylococcus aureus
MKQPILNKLESLNQEEAISLHVPGHKNMTIGHLSQLSMTMDKTEIPGLDDLHHPEEVILESMKQVEKHSDYDAYFLVNGTTSGILSVIQSFSQKKGDILMARNVHKSVLHALDISQQEGHFIETHQSPLTNHYNKVNLSRLNNDGHKLAVLTYPNYYGETFNVEEVIKSLHQLNIPVLIDEAHGAHFGLQGFPDSTLNYQADYVVQSFHKTLPALTMGSVLYIHKNAPYRETIIEYLSYFQTSSPSYLIMASLESAAQFYKTYDSTVFFDNRAQLIECLEKKGFEMLQVDDPLKLLIKYEGFTGHDIQNWFMNAHIYLELADDYQVLAILPLWHHDDTYLFDSLLRKIEDMILPKKSVSKVKQTQLLTTEGNYKPKRFEYVTWCDLKKAKGKVLARHIVPYPPGIPIIFKGETITENMIELVNEYLETGMIVEGIKNNKILVEDE

SEQ ID NO: 81 - protein, 528 aa, Brevibacterium linens
MGHMLADTHLHPDSATRTATTPAPTQANTSIDPRQHTAPYAEALRSLAADDWQRLHVPAHQGSRDHAPGLAEVVGEAGMSIDFPMLFSGVDQDNWRMINHDRVTPIMAAQQLAAEAWGASRTWFITNGASGGNHIATTVVRGLGREFVLQRSAHSSVIDGVTHAELRPHFVHGRVDPGLGSSHGVTPAEVDFALREHPNFAAVYLVSPSYFGAVADIAAIAEVAHRHDVPLIVDEAWGSHFGMHPKLPVNAVRLGADLVISSTHKGAGSLAQSAMVHLGHGPQAKRIETLVDRVVKSYQSTSSSAILLSSLDEARRHLVTHPEAIETALDTAEEIRTRVKNDTRFRDATPDILGGHDAIDNDPFKVVIDTRGAGITGSEAQYQLIRDHRIYCELATPSALLLLIGATSPVDVDRFWTALQELPRSEAEPVRPIVLPGSCQKRLDISDAYFAESQTVPFAEAVGRASADSLAAYPPGVPNVLPGEVLSAEVVDFLRATAAAPSGYVRGAQDSRMDTFAVVAEPSSTDLN

SEQ ID NO: 82 - protein, 594 aa, Chlamydomonas reinhardtii
MQEPDRLPGIESAHRGGGTPPHFASLMTAGGSGNGDGGLTPAFSPLQYDLTEIAGLDYLSSPSGVIAEAQQLAAQAFGADRTWFLVNGCSAGIHAAVMAVAGPGAGRARRRRQQVQHPQDMDNTSGSADGQTTTSDAGGQGAEPASEKPGVLLVARNCHLSVFSALVLSGLEPVWLAPELDPRAGVAHCVTPGTVAAALAGAAAAGRRVAGVMVVSPTYFGAVADVRGIAQVCAGYDVPLLVDEAHGGHFAFLPPASLPPPPPSALSCGADMVMQSTHKVLGAMTQAAMLHLRGERVSAARTSRALQTLQSSSPSYLLMASLDAARQQAAAGGAFAEPCAAAQVIREAVSRCSLVQLLDNQTAQGASNSGSSTEVGGSSHAGTSSSTLHGHPGSSCNAESIAFFDPLRLTLLVDRIAAVPAAAADGSSNSVRRCSGSSGFAVSEWLEARHGVVPELATAKTVVLALGPGSTLAHARQAVAAILELDRLAAAAPQDWAGGGVQAEPPHAPLAPDMVLSPRDAYFAETESVPAAEAVGRASAELLCPYPPGVPVLFPGERITPAALAALQATLAAGGTVTGASDSSLMRFEVLVVD

SEQ ID NO: 83 - protein, 481 aa, Geobacillus sp.
MMDQSRTPLYDALMHHWTQRPVSFHVPGHKYGTVFSKKAKTMFLPLLALDATEIAGLDDLHHPESVIAEAQALAAELYGARETFFLVNGSTAGNLAMIAAVCREKGQKVIVQRNCHKSIMHALQLMGATPVLLSPEVDTHVRVASHVRTDRIKEALALHSDAVAIVLTNPNYYGMAVDLTEIVRLAHERGIPVLVDEAHGAHFVAGCPFPKPALACGADIVVQSAHKTLPAMTMGAFLHVNSEQVDIERLKYFLQLFQSSSPSYPIMASLDLARNYVAELTKDDVAAIVAEVEELKAVIDDIDGVAVVSSQQSGVQTDLLKVTVQTRCRLTGYELQQQLERQGVFAELADPFNVLLVCPLAATGRLREAAERMKRAWRQLPTGEEPTFGSFMLSDSPLSSVVSYEKLRHARKKAVSLEEAEGRVAAETVIPYPPGVPLVWIGERVGSIHIARIRELLRHRAHWQGGSQLREGKLVVYEWEG

SEQ ID NO: 84 - protein, 773 aa, Methanolacinia petrolearia
MNPEERLQVGVIDANVHTDTPAGRAVTKIIQDLAEYGIEVTVLVSTEDARAALSNLPSADCIMVNWNVGESDDSPAGKKVASGVDANLIISEIRKRNEEIPIFLMGEPTSEPPKKLPIEMIKGINEFVWVMDDTAEFLAGRIRAAAKRYRDQLLPPFFGELVNFSRDFEYSWHTPGHAGGTAFRKSPAGRAFFNFFGEQLFRSDISISVGELGSLLDHSGPVGEAERYAAKVFGADSTYFVTNGTSTSNKIVFFGRVTADDIVLVDRNCHKSAEHALTMTHAVPVYLIPTRNRYGIIGPIHPEEFSPETIKAKIAASPLTKKLKNKTPIHSIITNSTYDGLCYHAEWVENELGKSVDSIHFDEAWYGYARFNPMYRNRFAMRDGAKNPGGPTVFATQSTHKLLAALSQASMVHVRNGRVPIEHSRFNEAFMMHSSTSPLYTIIASCDVSAKMMDGASGRMLTQEPIEDAIRFRRMMARINREIGTGKTANDWWFGMWQPDFVTDPSTGKKMDFADAGINLLGKEPSCWVLHPEDSWHGFTDLPDDYCMLDPIKVTVLMPGVKDDGTPADWGIPAAIVVKFLDTKGIVNEKSGDYNILFLFSMGITKGKWGTLVTELFEFKRHWEEETPLEEVFPDLVKEWPERYGGMTLPGLVNDMHDYMKKTEQGKLLQEAYEKLPEQVMTYAEAYRCLVRNEVEHVAVSDMENRIVATGVFPYPPGIPVLAPGESAGKKKGAIIKYLLALQEFDKKFPGFEHDIHGVENVNGKYMIYCLKE

SEQ ID NO: 85 - protein, 1031 aa, Eimeria brunetti
MNGRQHLFYVLVLVPPCTYLKKDHRLNLASELRRISSTETLNPSPNPDEGLEYRIVEVDSIRKALLAVIINPEILAVCIQDNVPMESNAGPPLSPLSRLSGFVRGLARFVEGPLSKIRLGAPPLPTLIEGLNSSRRGLDIYCVCTNMGLTTAGPVDHLVRRAFVPTEDHSDLHEALIEGVRAKARCPFFGALRAYAQRPIGVFHALAVSRGNSLRRSKWAHRLLDFYGAALFKAESSATCGGLDSLLDPHGSLLEAQRLAARAFDASYAFFVTNGTSTSNKIVLQALTRPNDVVLIDRDCHKSHHYGLVLSGARPCYLDAYPLHAYSMYGGVTLKTLKRALLGFRAEGRLQEVQVLVLTNCTFDGIVYNVKRIMEECLAIKPDIVFLFDEAWFAYAGFHPILKTRTAMHCANELRKELMERKYHHLHAALLDRLQVSSLDAAPASALLGLRLYPDPLKARVRVYATQSTHKSLTSLRQGSMVLVNDDKFESHVHTAFKESYYSHMSTSPNYQILATLDVGRSQMELEGYGLVERQIEAAFLIRNALGSDPFVNKYFRILGPHDMVPASLRQSSLQQSSGNKTENGRMNVQSLEEAWLSDDEFVLDPTRITLYTGQSGLDGDTFKELEMRRLLSSRRELEELQKQIDWIVKDCPALPDFSGFHPVFAILPQQQQQQQQHQLQQLQQQLQQQQQLVQQLQKQLQQQRLGNRNAAAGAATGEATTGAAAGGAAAAAAPAAAAAAETEDEGEKEEEDDVSPVSTPTSIDGSVKKENMNKGPSLNLGLNLNPYLNLNKQQLLPLPNCTSSSSSSSSSSSSSSSSSSSEDDYFKESVRDGDVREPFYLSYDEENVEYYSLQQALDLIQKGKILVGSTFIIPYPPGFPISVPGQIISAAIVEFMIKIDVKEIHGFDPKLGLRCFKESLINSLMQSRGIKLQQQQQQQQQQQQQQPQQPQHYDISGEAEEQENNNSSSPTTTASLLRLPDPNQRLQQELQQELQQELQQELQQELQQELQQELQELQQELQRQQQQQQL

SEQ ID NO: 86 - protein, 2194 aa, Plasmodium malariae
MNSVNDSMYSGDTNSLHVNSLYENNPDKSVKNINAVNDYITSSNAMSEEAETAAGNDELIPNSSSYHIHSQCKQRHQYKQYHQYNPHNQHKQYHQNKQYHQYNPHNQHKQHHQYKKRHPYKQYHQEKELLKYQPLPQYQHSTQYQGSIPHSQSQLHDGGKKRREKGKVERNKYDKIEELEKYININNATNVCSLRIKLWEALMLYVNNLNIELVYFIIYCLEEIEVYWGEEATDNLRDIINLINDKKYKEVLNKIGETLSSLSVTTGKTTEENPFFYTLIVSGRRDENNNNNNNNSNNNYNYNNNNSDLACELNKILHYEHNRLSNQSNNKKLEYKIIEASNAKEALLACLINPQILSVVLVDNLTIDEEKVKERDYYKFNEDNILNANCANSSYLLNCNLQNNTQMVMKNPLNHNGMMHSGGVTTVQSSKDVLLIGNSMLPEYLNNNNVNINENSNVRSLRSLYIKRNYKFDIGDFVIGYEQLVSAPLEKMKKGFNILVILIKSIAYIRSSVDIFCVCTSITLDKLHSVNNKIIRIFTTHDDHSDLHESILDGVKKKIKTPFFNALKAYAERPIGVFHALAISKGNSVRRSRWIQSLLDFYGVNLFKAESSATCGGLDSLLDPHGSLKEAQIMAARAYGSKYCFFVTNGTSSSNKIVMQALVKPGDIILVDRACHKSHHYGFVLSQALPCYLDPYPVSRYGIYGAVPIYVIKKSLLDYRNSNKLHLVKLLILTNCTFDGIVYNVKRIIEECLAIKPDLIFLFDEAWFAYACFHPILKFRTAMTVAEKMRSKEQKRIYYKVHKKLLKKFGNVKSLNQVSADKLLKTRLYPNPSEYKIRVYATQSIHKSLTSLRQGSVILIRDDNFESHAYTPFKEAYYTHTSTSPNYQILATLDAGRAQMELEGYGLVEKQTEAAFLIRKELSEDPMISRYFRILNAEDLIPDSLRQCAVSYMKRKKKIIKEYDSSDSRCSANVTYSCVSNNNTRGIVNPSDSGKYYLSGEQNVVHSVNAWLMDKYGIQINKTSINSVLFQTNIGTTGSSCLFLKSCLSLISQELDQKKSLFNERDLNQFNENVFNLVSNYIDLSEFSEFHPLFKKRYTDPKIFNKEGDIRKAFYLAYEEDYVEYILLSDLKERIRQNEMIVSASFIIPYPPGFPVLVPGQIVSQEIVDYLSGLSVKEIHGYDENIGFRCFYNFVLDYFYNMVISDPYSLYQKIDKETYEKLKHMSLSKRKSLESVCYLYIYDNESNKMKKVYLCSGNVSTENNTIVSDTCDEITQNHARRSYNKKGKQTSIYENFSKSAQNAGNASGVVNVSGKIGNIIYGDNFNNCANGKDICHHLYGKEEEGFFDVNDENAFSNDVLHLNHYAIKNPLKKGTTETFIKKTCNQKSSWKEKITDKYHGTPNGTRRDKHNVLSSKKKENGRKCKGIQVNNNNNNNNNNVILINSESYDHDQKVIDLVDTPEKSNKNYECHEDDGRDNDDDDDRHSGGGSNYNRDSSNNSHNVDRKRYVVGTDKHSGGSNTHNVGTDKHSGGSNNNKRSLERKKKRNEGNYMSLSYKANIYGHKVVFNRGNNNNDDANVKAYNEKDGKGGERNNNCTFYDKNVNGMNRERSLKNISYMSNISEIRGMNNVNNVRRKNRIDEGKDRNIKGTDDSDYLLSEVTANMSKNIGPISDIYSLKKISKLNRSDDGKYENSLSDYVPKLKSSNIVIYNKVKKNALLMGRKHMSDGKSRNNHHRKNSHMNQKSNKDYVYYSDSSKKINEIIYMKRQDGDLTEENAIVRENLNELNSNLFYSNGIGNKGGHIKGSEKNSSNNSGTLSGTNNGNNSNYSIQNFANVNEKAGGITFTTPNIVEDEYCDKKDIPIKRGNNSGDNNGLNSGYNSGHNGVHNSCNDSSNKPIINEGTGYNDSYHSDQDANKSNEEKYKSNGLIHPSNLERNIILGNEIIVEKDNNLCYRNISGHNLNETNSYVYANDGTIAEGHYGNNNMARGSNIGCSDDIEGSEDIEGGEDIEGGEDIEGGEDIEGGEDIEGADDIEGADDIEGSYNIRGSSNIYMGNSNAISDAAQVSGSVNDANISNLMVHVKDEIGFCGKNFLYSENELKMNALLREEEKDKSTIRNLNTLNNNSYINNLITNVDDDTFIHKEGNFFLECTLTNSEMNCSSFEMDMSVNNIYPNGGEHVKQHRKYDDDLKKEF

SEQ ID NO: 87 - protein, 728 aa, Escherichia coli
MCWEGPFLPGDMTMNVIAILNHMGVYFKEEPIRELHRALERLNFQIVYPNDRDDLLKLIENNARLCGVIFDWDKYNLELCEEISKMNENLPLYAFANTYSTLDVSLNDLRLQISFFEYALGAAEDIANKIKQTTDEYINTILPPLTKALFKYVREGKYTFCTPGHMGGTAFQKSPVGSLFYDFFGPNTMKSDISISVSELGSLLDHSGPHKEAEQYIARVFNADRSYMVTNGTSTANKIVGMYSAPAGSTILIDRNCHKSLTHLMMMSDVTPIYFRPTRNAYGILGGIPQSEFQHATIAKRVKETPNATWPVHAVITNSTYDGLLYNTDFIKKTLDVKSIHFDSAWVPYTNFSPIYEGKCGMSGGRVEGKVIYETQSTHKLLAAFSQASMIHVKGDVNEETFNEAYMMHTTTSPHYGIVASTETAAAMMKGNAGKRLINGSIERAIKFRKEIKRLRTESDGWFFDVWQPDHIDTTECWPLRSDSTWHGFKNIDNEHMYLDPIKVTLLTPGMEKDGTMSDFGIPASIVAKYLDEHGIVVEKTGPYNLLFLFSIGIDKTKALSLLRALTDFKRAFDLNLRVKNMLPSLYREDPEFYENMRIQELAQNIHKLIVHHNLPDLMYRAFEVLPTMVMTPYAAFQKELHGMTEEVYLDEMVGRINANMILPYPPGVPLVMPGEMITEESRPVLEFLQMLCEIGAHYPGFETDIHGAYRQADGRYTVKVLKEESKK

SEQ ID NO: 88 - protein, 387 aa, Sporomusa sp.
MKYFRLSQNAVKALADTYSTPLLVLSLEQIELNYNLLAENMPGVKIYYAVKANPDERIVRKIHELGGYFDVASDGEMQMLNRMGIDSARMVYANPMKTASGLKVAHAVGVNKFTFDCESEIGKMAAAEPGATVLLRIRVDNPHALVDLNKKFGAHADEALALLTKAQAAGLDVAGLCFHVGSQSTDNAAYLEALKTCRELFSAAAERGMNLRILDIGGGFPIPTLTEEPDVAVMAAEIYKAVRQYFPETEIWSEPGRYICGTAVNLITQVIGTKERNNQQWYFLDDGLYGTFSGVIFDHWDFELETFKTGKKIPATFAGPSCDSLDIMFRDKPTVPLEIGDLILVPNCGAYTSASATVFNGFAKTQIVVWEEVYEEIKAKLELAAAV

SEQ ID NO: 89 - protein, 475 aa, Dethiosulfatibacter aminovorans
MKLGEELKKYREAGTARFHMPGHKGISSCLEEVFVLGNDVTEVDGLDNLHKPTGVIKDLLEDISGVYGSYKTLISTNGSTSSLQSAILGVTKPGDSILVDRNCHKSVYNAMILGDLNPVYLMPKCDEESGLSWIEDLAGLEESIRADEKIKAVVLTYPTYFGICCDMEKIAETVHRYDRILIVDEAHGSHLRFCDSLPCSALDAGADIVVQSTHKTLPSLTQSSLLHIRDEKHVEGVSDMISMLLTSSPSYLMMASIEASVDLMDREGSSRLKANMDCVDKMADRYENAGRIFRKRDYFIKRGVHDFDDTRLLFKTSEIGVDGGRAESILRKEYNVQVEMADTNYVNAFMTACDGAYDIERLFAAVNDMVLKYGMTADDEKTGSEDEASMPCTMECPEMAMNMRKAFYSEKTSVDIIDAVGEICGCHITPYPPGIPLLCPGEKITGQLVERIIKISKSGIEVMGLEEGKIKIIKI

SEQ ID NO: 90 - protein, 463 aa, Prochlorococcus marinus
MSISSFLTKKFLKSLFFPAHNRGAALPKKLVKLLKNHPGYWDLPELPEIGSPLSQSGLIAKSQREFSDKFGAKGCFFGVNGASGLIQSAVISMANPGENILMPRNVHISVIKICAMQNINPIFFDLEFSTVTGHYKPITKIWLDNVFKKLNFDENKIAGVILVNPSYHGYAGDLEPLIDCCHQKNLPVLVDEAHGSYFLFCENLNLPKPALSSNADLVVNSLHKSLNGLTQTAALWYKGNLINEGNLIKSINLLQTTSPSSLLLSSCEESIRDWLNKKSLSKYQKRILEAKIIYKKLIQKNIPLIETQDPLKIVLNTSKAGIDGFTADKFFYRNGLIAELPEMMTLTFCLGFGNQKDFLNLFEKLWKKLLLNSKKSKSLEVLKSPFKFIQAPEIEIGIAWRSETKSIPFSESLNKVSGDIICPYPPGIPLLVPGEKIDLDRFNWINNQSLCNKDLVNFNIKVL

SEQ ID NO: 91 - protein, 2219 aa, Plasmodium knowlesi
MNSANDAIFYGEKNSVHCNDLSESGPDRCVKNGDMQNDYIMSNDVTSEGVDITVDPGENGVVNAAYLDTPLHQHLPPHRGERKKKQYAKTERDKYDRIEELEKYLNISNATNVCSLRIKLWEALMLYVNNVNAELIYFIIKCLMEVEVYWGEEASNNLQDILNLINDKKYKEVLNKIGETLSSLSVTTGKATEENPFFYTLIVSSRRDENNSNYNSDLACELNKILQYEQNRLSNQNNNKKLEYKIIEVSNAKEALLACLINSQILSVVLVDNLSIDEDYRREGFEFYNFSEENSLNNKCGMLNGGMVSGGMVNGGMVNSGMINGGMVNMASMINVASMANGGAQMKPPFTHSMHNGSSSNSRDAMRNIILSNYRGCNGNNGSVCNNYCGGGGQYGNGQYGSAPSANNPNGSGSALLNEHKKGANLLMKDYKFDIGNFVLGYEQLVAAPLEKMKKGFNSLVILIKSIAYIRSSVDIFCVCTSITLDKLQSVNNKIIRIFTTHDDHSDLHESILDGVKKKIKTPFFNALKAYAERPIGVFHALAISKGNSVRRSRWVQSLLDFYGVNLFKAESSATCGGLDSLLDPHGSLKEAQIMAARAYGSKYCFFVTNGTSSSNKIVMQALVKPGDIILVDRACHKSHHYGFVLSQALPCYLDPYPVSRYGIYGAVPIYVIKKTLLEYRNSNKLHLVRLIILTNCTFDGIVYNVKRVIEECLAIKPDLIFLFDEAWFAYACFHPILKFRTAMTVADKMRNQEQKRIYHKVHKKLLKKFGNVRSLNEVPAEKLLKTRLYPNPDEYKVRVYATQSIHKSLTSLRQGSVILISDDNFESHAYTPFKEAYYTHMSTSPNYQILATLDAGRAQMELEGYGLVEKQVEAAFLIRKELSEDPIISRYFRTLNAEDLIPDSLRLCHNLYMKRKRKCTKEGYSTDSKGSINGTYSCVSNHQGKASTTTKEKRSKALRMARKGRRSGTNNEHTIQSSNISSHECVNDTTGCTNNVVRNSFIFGDFTNNNSVVEGGINDFGNDPRGYVKMNKRKSRRDERNGKEGGTSGTIDDSNNGSIILNSENENISFVHDRHNRNYNGSSYEIEMKNFLEYFECSWLSEDEFVLDPTRITLFTGYSGIDGDTFKVKWLMDKYGIQINKTSINSVLFQTNIGTTGSSCLFLRSCLSLISQELDQKRSLFNERDLNQFNDSVYNLVSNYIDLSEFSEFHPLFKKRYSDRRIFNREGDLRMAFYLAYEEDYVEYILMSDLKERVRQNELIVSASFIIPYPPGFPVLVPGQLISQEILEYLSGLSVKEIHGYDESMGFRCFYNFILEYFYNLVTSDPYAYYQKMDKGTYESLKCANLSKRRSMDNSYNLYIYDNETNRMKKMHGCNGSSSIYNNTSISDTYEDIVQVYNARSDHGRRNHHHNEYHGRHHHHHHHVSEYDSVNNNSTSTIPTLPHGGAVGESSVKGLHGSAKSGKERDAPRTMDGTSNSAGVSNHNTRRGSGEEGFQGVSEMNNEQAISNGTGGSLSERNIGKSRAKGSLKESRMTHVEQNKTNIYDHHSNGMVRYDQNSSLVSKVKENVLIVKGKIGYASCGVGERSANYRYRDDPLPSVPKHKKEKKCKGCKSCDGGKSNHVALVKRRARADRIPQKREDAYNFESERSNEDDIHKERKQHQSRALNGRVVKKGKKKNASVGASGRDVACGESETNNTEEITEEITEDITEEIAEEVAKENEKKNKEEGSVDSNSSDGDTTMPEEDGDSASAMKERRHGGKAQNVEGTDSGSYNTKKKGSIRGKVRKQKGNRNRNFNRECNRETDESNNVQSDVTVNTFNGANSISEIHCMRKEKRNDISEDDRYKNGGKGELIPKTRKSYPVMCNQLGKSGLRMKMQRKSAPGDSHWNNPLSYVDNKNYSYRSGSKNKGNEMECTKGSSKREDNYAGGASRGNSHSSRRSSSMSSSENYQSSESLKGGGSHSHAGRKSSTGLSGSEKANRSTTRSVGKSSKKNEEEVHNRVKEMNSPNGSMRNGSNEGAPLNRKIFISQEDIDKVSVDNQTGGSDNSSENRVTSENNLSHNSDIINSGEDVSGSAKRGAESRVSSRMNVNGNDGNNGTPNTEGKGEIAFCGNEYHYDGDDMKVNSSARENNELEKNCIRKLNSLNNNSYINNLITHVDDDTFIHKEGNFFLECALTNSEMNGSSFEMDMSLNNVYSNGGDGDRHPGSYGRGKKSDFE

SEQ ID NO: 92 - protein, 785 aa, Betaproteobacteria bacterium MOLA814
MRQVPCGHTLVFYTEWLVRSLLDTNMKFRFPIVIIDEDFRSENTSGLGIRALAQAIESEGVEVLGVTSYGDLSQFAQQQSRASAFILSIDDEEVTQGPDIDPAVERLRGFIEVVRRKNADVPIYVHGETKTSRHIPNDVLRELHGFIHMFEDTPEFVARHIIREAKSYLEGIQPPFFKALLDYAEDGSYSWHCPGHSGGVAFLKSPVGQMFHQFFGENMLRADVCNAVEELGQLLDHTGPIAESERNAARIFNADHCFFVTNGTSTSNKMVWHHTVAPGDVVVVDRNCHKSVLHAIIMTGAIPVFLKPTRNHYGIIGPIAQSEFEPETIREKIRNNPLLKDYDADTVEPRVLTLTQSTYDGVLYNTETIKGMLDGYVTNLHFDEAWLPHAAFHPFYGTYHAMGKNRERPEHAVVYVTQSLHKLLAGISQASHVLVQDSKTVKLDTHLFNEAYLMHTSTSPQYAIIASCDVAAAMMEPPAGTALVEESILECLDFRRAMRKVAKDYGNQDWWFKVWGPKVNELSDDTDEGIGEPADWVLGMGKDNNWHGFGDLADGFNMLDPIKATIVTPGLDVDGTFAETGIPASIVTKFLAEHGVVVEKTGLYSFFIMFTIGITKGRWNTLLTALQQFKDDYDRNQPMWKILPEFSKANKKYERMGLRDLSQHLHAMYAKHDIARVTTDMYLSDHTPAMTPGDAFAHIARRTTERVPIDDLLGRITTSLITPYPPGIPLLVPGEVFNQRIVDYLKFSRELSAQCPGFETDIHGIVGILDDSGVKRFFADCVRAT

SEQ ID NO: 93 - protein, 377 aa, Unknown
  Description of Unknown: Mine drainage metagenome sequence
MTDKISRFLASAQPETPCLVVDLDVIAGNYHALRHYLPLAEVFYAVKANPAPEVIALLAGLGSSFDTASRPEIEAVLAAGVAPGRISFGNTIKKLKDIAWAYERGVRLFAFDSEAELDKLAEAAPGSKVFCRLLMTCEGAEWPLSRKFGCEADMARALMLKARALGLVPYGLSFHVGSQQTRLDQWDLAIGRAAALFRDLAAEGIALAMLNLGGGLPARYRDDVAPVERYAGAIMQAMTDHFGNDLPQMITEPGRSLVGDSGILETEVVLVSRKSFADDERWVYLDVGKFGGLAETMDEAIKYRLQLVGGGEGPSGPVVLAGPTCDSADILYEKHQYQMPLSLKPGDRVRILSTGAYTTSYAAVNFNGFAPLKAYFV

SEQ ID NO: 94 - protein, 878 aa, Delftia sp.
MKFRFPIVIIDEDYRSENTSGLGIRALAQAIEEEGFEVLGVTSYGDLSQFAQQQSRASAFILSIDDEEFSLGDGGTDPVIHSLRSFIGEVRRKNADVPIYIYGETKTSRHLPNDILRELHGFIHMFEDTPEFVAKHIIREAKSYLEGVQPPFFKALLDYAEDGSYSWHCPGHSGGVAFLKSPVGQMYHQFYGENMLRADVCNAVEELGQLLDHNGAIGESERNAARIFNADHCYFVTNGTSTSNKIVWHHAVAPGDVVVVDRNCHKSILHSIIMTGAIPVFLKPTRNHFGIIGPIPQSEFSVESIQAKIAANPLLKGVDAKTVKPRVLTLTQSTYDGVLYNTETIKSMLDGYVANLHFDEAWLPHAAFHPFYGSYHAMGKKRARPKHSVVYATQSIHKLLAGISQASHVLVQDSQTEKLDHHLFNEAYLMHTSTSPQYSIIASCDVAAAMMEPPGGTALVEESILEALDFRRAMRKVEDEFGDDDWWFEVWGPEKLADEGVGSAQDWIIRGHDAAPKRSKAKNGKEFDNWHGFGELADGFNMLDPIKSTIVTPGLDLDGDFSDTGIPASIVTKYLAEHGVVVEKTGLYSFFIMFTIGITKGRWNTMLTALQQFKDDYDRNQPLARILPEFCQQHRRYERMGLRDLCQHVHQLYAKYDIARLTTEMYLSDLQPAMKPTDAYAHIAQRKTERVEIDHLEGRITVGLVTPYPPGIPLLIPGEVFNRKIVDYLLFAREFAKECPGFETDIHGLVELQSEDGEVRYYADCVAGTAPARKTPAGGKPAAKKAVKTAAKPAAKAAAKTAGKAAAKTVAKAAAKPAAKPAGKVAKAAAVTGVKAPAKRPAARKAQPAAPEVGTAAKPARGRKMVQVGDDGPFGRTI

SEQ ID NO: 95 - protein, 757 aa, Pseudomonas putida
MSFGGSHLMYKDLKFPILIVHRAIKADSVAGERVRGIAEELRQDGFAILAAADHAEARLVAATHHGLACMLIAAEGVGENTHLLQNMAELIRLARMRAPDLPIFALGEQVTLENAPAEAMSELNQLRGILYLFEDTVPFLARQVARAAHTYLDGLLPPFFKALVQHTAQSNYSWHTPGHGGGVAYHKSPVGQAFHQFFGENTLRSDLSVSVPELGSLLDHTGPLAEAEARAARNFGADHTFFVINGTSTANKIVWHAMVGRDDLVLVDRNCHKSVVHAIIMTGAIPLYLCPERNELGIIGPIPLSEFSPEAIEAKIQANPLAHGRGQRIKLAVVTNSTYDGLCYHAGMIKQALGASVEVLHFDEAWFAYAAFHGFFTGRYAMGTACAADSPLVFSTHSTHKLLAAFSQASMIHVQDGARRQLDRDRFNEAFMMHISTSPQYSILASLDVASTMMEGQAGHSLLQEMFDEALSFRRALANLREHIAADDWWFSIWQPPSTEGIQPLAAQDWLLQPGAQWHGFGEVADGYVLLDPLKVTLVMPGLSAGGVLGERGIPAAVVSKFLWERGLVVEKTGLYSFLVLFSMGITKGKWSTLLTELLEFKRHYDGNTPLSSCLPSVGVADASRYRGMGLRDLCEQLHDCYRANATAKQLKRVFTRLPEVAVSPARAYDQMVRGEVEAVPIEALLGRVAAVMLVPYPPGIPLIMPGERFTEATRSILDYLAFARAFNQGFPGFVADVHGLQNENGRYTVDCIMECE

SEQ ID NO: 96 - protein, 465 aa, Vibrio anguillarum
MNNISLPIYNSLNNANKKLKGSFHALPIQNLGKTKDVVVSEDFNARLSKVKELELSLTSPFFDSLTDPSKAIDESANILKDMYGSDLSLFVTCGSTISNKIIIEAICKSSDKVLCQRGVHQSIYFSLKAQNSDVNYVQDLICNDDAYIYSADTQGIIDALVRAEETGTSYTTLIINSQTYDGVCFDLQEFLPVVCERAKGIKNIVIDEAWGAWSTFDPKMKEKSAIQNASTLSKKYDVNFIVTHSVHKSLFALRQASIINVFGSEDCQTKVVGSHFRNHSTSPSYPILASTELALSHANQYAVQYSNRISEQCEYLKSFINDLSLFRYLSLTLEEEYLIQDPTKLWITCTTKLLSGAKIREILFNKYGIYVSRYSHNSILLNLHHGISNELIGLLANALCEIDKKYKTKNNLLNINVGDIANSFYILYPPGIPILTPGQTICNNVITKINQSIFDDTSLLIVEGN

SEQ ID NO: 97 - protein, 764 aa, Candidatus Burkholderia crenata
MKFRFPVVVIDEDFRSENISGSGIRALAEAIEREGVEVFGLTSYGDLTSFAQQSSRASCFILSIDDDELLPYVDNVVVAEGDTPERASAIVALRAFVQAVRKRNADIPIFLYGETRTSRHLPNDILRELHGFIHMFEDTPEFVARHIIREAKVYLDALAPPFFKELVQYAEEGSYSWHCPGHSGGVAFLKNPLGQMFHQFFGENMLRADVCNAVDELGQLLDHTGPIAASERNAARIFSADHLFFVTNGTSTSNKIVWHATVAPGDIVLVDRNCHKSILHAITMTGAIPVFLTPTRNHFGIIGPIPRDEFKPENIRKKIEANPFAREALAKNPKAKPRILTITQNTYDGVIYNVEMIKDLLGDLLDTLHFDEAWLPHAEFHDFYQDMHAIGAGRPRTGALVFATHSTHKLLAGISQASQIVVQDSENSTFDKHRFNEAYLMHTSTSPQYAIIASCDVAAAMMEPPGGTALVEESIAEALDFRRAMRKVDDEYGDEWFFKVWGPEALAEEGIGDREEWVLKPNDCWHGFGPLAEGFNMLDPIKATIITPGLDVDGEFGETGIPAAIVTKYLAEHGIIVEKTGLYSFFIMFTIGITKGRWNSMVTELQQFKDDYDNNQPLWRVLPDFIAQHPSYERIGLRDLCEQIHSVYRANNIARLTTEMYLSSMEPAMKPSEAYAKLVHREIDRVPIDELEGRVTSILLTPYPPGIPLLIPGERFNKTIVDYLRFAREFNERFPGFHTDSHGLVGEMINGRIEYFVDCVALER

SEQ ID NO: 98 - protein, 549 aa, Leucobacter sp.
MLIADSARRDAAPAATDPQTTVQDATVQDVTVQDVTAQDATVQDVTAQGDERLRRHAVTPYADALDRYIARNPTQLMVPGHGGSDLGLSARLSEYLGERALQLDVPMLLEGIDLEAHSALDEALELAADAWGAKRTWFLTNGASQANRTAAIAARGLGEHLLAQRSAHSSFSDGVLLAGITPSYVFPAVDAVNGMAHGVSPEALDAALTLAEQEGRAAAAVYIISPSYFGSVSDVRGLADVAHAHGAPLIVDGAWGPHFGFHPELPESPARLGADLVVSSTHKLAGSLTQTAMLHLGHGPFADRLEALVERAFGMTASTSTSAIMRASLDIARSALVTGEAAIGRSVETAQHLREVLRADPRFDIVSDHFGEFPDIVDTDVLRVPIDVSATGLSGHWVRNQLITDHALYFEMSTATSIVAVIGAGKTPDVAAIHRALEDVVSSAAADAERAATAGAVEFPPMPAPGARRLTPRDGFFGETEIVPAAEAIGRVSADTLAAYPPGIPNIMPGEEITAAAVEFLQAVSGSPTGYVRGALDPHVSTFRVIRVG

SEQ ID NO: 99 - protein, 156 aa, Pantoea ananas
MNILAIMGAHGVFYKDEPLRELDVALSQQGFQLIRPKNTDDLLKLIEHNPRISGVIFDWDEHNSPELCGEINQLNEYLPLYAFINTHSQMDISINEMRLPLHFFEYALNAADDIALHIRQYTDDYLDHITPPLTKALFTYVKEGKYTFCTPGHMAG

SEQ ID NO: 100 - protein, 471 aa, Phormidium willei
MLQSKTPFLDALKAEANSSHTPFYFPGHKRGQGIANPLKNWLGLEMFQGDLPELPQLDNLFQPQGPIKAAQQLAAAAFGAKQTWFLTNGSTAGVIAAILATCNPGDKVLLARNSHQCAIAGLILAAAEPVFIQPDYDPQWDMVLRVTPEALETALKQNSDIKAVLVVSPTYHGICSDVARLAACCHRHGIPLIVDEAHGAHLGFHPQFPASALQGEADLVVQSTHKSLTALSQGAMLHYQGDRISPDRIQAALPLVQSTSPNSLILASLDMARQQIATEGYQQLQDCVEMAQQLRSHLSQLPSVALSPHADDPSRLTLRIGQLTGYEADEQLTEHFGVIGELPQLHHLTFALTLGDRPPDGDRLLNAIRHLAQSAPIPSPLSSQDLSPIPPAIMTPRQAHFAPKKKVFFHKTSGEICGELICPYPPGIPILIPGERITETALIHLKETLAAGGVLTGCQDTSGEFLSVVDR

SEQ ID NO: 101 - protein, 509 aa, Richelia intracellularis
MNLHPIIIPMPLTCNSDFSQTSTPLLDTLWDSANKPHTAFYTPGHKLGQGISPRLATYFGKDVFRADLPELTALDNLFSPTGVIQAAQELAAQVFGASQTWFLVNGSTCGVEAAILASCGSGDKIILPRNVHSSVISGLILSGAIPIFVNPEYDPVLDIAHSITPQGVAAALELHPETKAVMMVYPTYYGVCGDVAAIANLAHEYNIPLLVDEAHGAHFAFHQQLPTTALAAGADLTVQSTHKVLGAMTQASMLHIQGKRIDRDRVHKSLQLLQSTSPSYLLLASLDAARQQMAICGEELMSRTLQLAARARSRISQIPGLSVLEVPISYYPSFVALDGTRLTVTVSELGLTGFAAEEILDEQLGVTCEFASLKNLTFIISLGNTKEDIDYLVQAFSILAQEYCQPVEQQNMSHPCVYPIPEGISNSILMLPREAFFAHTEALSITSERICDRICAEIVCPYPPGIPILMPGEVISQSALAYLQQIKQMGGFINGCTDTNFETIKVIKI

SEQ ID NO: 102 - protein, 964 aa, Tetrasphaera japonica
MSEFSAQAYNAWWQARLDAWSQVEEEADRRVRSVDPERAEAMTAAIEKDLELLSHIERYWAYPGKDGFLRIQELFRTGGPVEFARAVAQVKRGVSADYSYGATETRSSSDLASDGVESLEPNGTGRQRYFEVLVVERMTVEQERALREDLRRWRRPDDEFIYDIVVVGSGEEAFVAMWLNPTIQACVIRKRFGHASSHDLSLLSQFLDPGVRDRLDRHTPRERIDILADELSEIRPEVDLYLMTEVAVEEVAGSLSPHFRRVFHAREGLLELHLSILDGVAHRYRTPFFDALRSYAHRPTGSFHALPIGQGKSVVTSHWINDMVDFYGLNIFLAETSATGGGLDSLLEPTGPLRDAQQLASEAFGSTRSYFVTNGTSTANKIVGQANVGPNDIVLVDRNCHQSHHYGLMLAGARVSYLDAYPLNEYAMYGAVPLTEIKGKLLDLKRAGKLDRVKMVMLTNCTFDGILYDVQRVMEECLAIKPDLVFLWDEAWFAFGRFHPVYRTRTAMYSAERLVHRLRSPELRERFEEQAAALGDDPDDETLLTTRLVPDPDRARVRVYATQSTHKTLTSLRQGSMIHVFDQDFSGKVAEAFHEAYMAHTSTSPNYQILASLDIGRRQAALEGYELVQKQLEFAMRLRDAIDNHPLLRKYMRCLSTADLIPEAYRPSGISQPLRSGLRNMINAWDHDEFVLDPSRITLSIAATGIDGATFKSEQLMDRFGIQINKTSRNTVLFMTNIGTSRSSVAYLIEALVSIARDLERKFDEMSPWEFDAHRRAVARLTAASAPLPNFGGFHEAFREPSDPPTPEGDMRKAFFGTYADGACEYVLQANVEERVRAGEKLVSATFVTPYPPGFPVLVPGQVITEDVLEFMARLDTPEVHGYQAEVGYRIYRGSALPAPKVPSSPNGTSTSASVSVDGLPMDGAGDGSSPEPAAVASAASSRRRSSRSRAGAVAGAKSAPDGA

SEQ ID NO: 103 - protein, 477 aa, Pontibacillus halophilus
MIEHQRTPLYETLVKHRWKGATSYHVPGHKNGNVFYERGKTLFQDILSIDLTEISGLDDLHEPGGVIQEAQELASTHFGSRASYFLVGGSTAGNLASVLAASEREGPILIQRNSHKSIYNGLELSGASTVLIAPRYSVRTGLYHDLHVEDVIEAVEQFQDASAIVLTYPDYYGNTYDLKSIIDYAHQFDIPVIVDEAHGVHLHLDPRLPSSAIELGADIVVHSAHKMAPAMTMGAFLHHCSSRVDINRIQHYLQLIQSSSPSYPIMASLDLSRAYLASLDEKEIGRILERIETERKLMASPHHYEVIPHHATDDPFKTTLRVQEGYNGQEIARRLEGVGLFPELVQDSHILLVHGLDYSELNTIEKRWEKAHNSLKSMQGNHATIETEVMNYPAITRMPYPYQQLKHWVTKEVTAEEAVGQLSACSVIPYPPGIPLIAKGEIITEGQINELRRLQQSNLHIQSSECNLQKGLLIYER

SEQ ID NO: 104 - protein, 468 aa, Prochlorococcus sp.
MFYSMGLLNLLSANRNENLFLPAHGRGNALPKNIKTLLRLRPGIWDLPELFEIGGPLISEGAIAESQKSSAYEVGVDRCWYGVNGATGLLQSSLLALARPGQAVLMPRNIHKSCIQACLFGGLTPLLFDVPYLTDRGHASVLERKWLQRVLKKAKEFEEDIAAVVLVNPTYQGYCADIESLIKEIHSHSLPVLVDEAHGAYLISQIRPDLPKSALSFGADLVVHSLHKSASSLVQSAVLWSQGDKVDPFKIERAIELLQTSSPSSLLLASCESSIKELIEPNGIKKLRSRIDEAEVLKDFLINKEVPLLENNDPLKIILHTSKFGLSGIEVDKSFMKKRIIGELAEPGTLTFCLGLSSHKRLGKRFVRIWNQILSSYCKQKPCFFKRPPFSIVSKPYKPCSDSWGSDFEKVNLKDSIGRISVEMVCPYPPGIPLLIPGEILDEARVDWLIEQKSFWPEQISDFVRVIS

SEQ ID NO: 105 - protein, 376 aa, Acidiphilium sp.
MTPKLARFLDSGMVSTPAILVDLDRVAANFAALRAALPDAAIYYAVKANPAAPVLDRLVGLGSRFDAASIEEIRACLAAGAAPAAISFGNTVKKRAAIAEAHARGVDLFAFDSDEELDKLAAAAPGAKVYCRLAVSQDGADWPLSRKFGTSGTHARDLLVRAAERGLIPWGVSFHVGSQQTGVGAWRTAIGQAAAVFTDLRARGIDLRLLNLGGGFPTRYRDDIPPLGDFGAAIMDAVRQAFGNNVPDLLIEPGRAIVGDAGVAVSEVVLACTRHEDEGRRWVYLDLGRFGGLAETEGEAIRYRITAPGVAGADAPAVLAGPSCDGVDVMYRETPCPLPASLAAGDRVLIHDTGAYVTSYASQGFNGFLPPEEHYL

SEQ ID NO: 106 - protein, 781 aa, Mesotoga infera
MELFKDFPVLVVDDDLRSENTGGRATREIVKELQKRGFSVIESYSGYDCRIEFMSHSNVSCVLLDWDLVIKPDAEFLGPGEIIEIIRGRNMLIPIFLMTEKLRVKEIPLEIVSQIDGYVWKLEDSPSFIAGRIEEATERYMDELLPPFLKELIRYVDEFKYSWHTPGHSGGEAFLKSSTGKIFHKFFGENIFRSDLSVSVPELGSLLEHTEAIGESEKSAAKIFGSDETYFVTNGTSTSNKIVFHYCVTPGDIVLIDRNCHKSIMHSIIMTGAIPIYLTPSRNSLGIIGPIHEENFEWSEIEKAIKESPLVEDKENYRIKLAVITNSTYDGLCYNARTILDRLEKVVDFVLFDEAWYAYAKFHPMYLGRFGMSSDIDRERSPVVFSTHSTHKLLAAFSQGSMIHVKDGRKRVDHGRFNEAYMMHMSTSPQYAIIASLDVAAKMMAGNAGRFLIDETIQEAIIFRKKMKHLKKEIESKETDRKRRWWLEIWQPDKVSIETESGERKTFDLEDIDESILKDRPDCWYLKANEDWHGFGKLDNDYALLDPVKVTVMTPGITKQGRMKNWGIPATIVTTFLRDRGIVVEKSGHYSFLILFSLGLTKGKSGTLLAELFTFKKLFDEDAALDDVFPDIVRKFPKKYGKMTLQELCRQMHEYLRKVRITKVLKDVYSLNPEQVMLPAKAYSELVNGNTELVRIRELQNRISAVMVVPYPPGIPVIMPGERYTGDTKRIIEYLNLSEEFDNKFPGFENEMHGLKMKIDSANKKRYYTYCLKEFEQEDNE

SEQ ID NO: 107 - protein, 401 aa, Phascolarctobacterium succinatutens
MSNKKHFQISQQAVEKLAVRFGTPLLVLSLEEIKKNYKVLKKYMPRVKIHYAIKANPHPEILRVMADMGSCFDVASDGEIRTMHDMGVDGGRLIYANPVKTGVGLEACRSCGVRKMTFDSASEIDKIKKQCPDATVLLRLRIDNSSAHVDLNKKFGAARENALALMQQAKEAGLDMAGIAFHVGSQTVSADPYLHALDIARELFEEAEAAGLKLRILDVGGGFPIPEPKVKFNLPEMLRQINARLDEDFADAEIWAEPGRYICGTAVNLITSVIGVTERGGQPWYFLNEGLYGTFSGVLFDQWDFKLISFREGEEKVAATFAGPSCDSLDIMFRGRLTVPLQVGDLLLVPSCGAYTSASATTFNGFSKAKFVIWERVKAEVEPVAAVGRVEMNQSVAQAVK

SEQ ID NO: 108 - protein, 503 aa, Candidatus Atelocyanobacterium thalassa
MTPPKKVYSHYQNTAPLIDILNILKKQQDAAFYAPGHKRGQGINSSLSSLLGKKVFQSDLPELPELGNLFIPDEAIEKAQNLAAEAFGARRTWFLINGSSCGLVAAILAVCNPGDKIIVPRNIHHSITTGLIMSGAVPIFLYPKCDSKWNLPLNITPSILEATLEKYHNIKAVLIIHPTYHGICGNISEIVKITHSYNIPLLVDEAHGAHFQFHEILPSSALSAGADLSVQSTHKVLSAMTQASMLHIQGNLIDEHRINQTLQFIQSSSPSSLLLASLDGARQQIVIDGQKLLNKTIKLSKLSRNKINDIDGFSTLSLVEKKPEFYDLDITRLTVDISSLGVSGWQVDKILRTKLNVTAELPMLSSLTFIISIGNTEEDITALVKAFLKLKKIIHSSSSGIVIPSSSCNLKSFSSLSISPRDAFFASKKIVFIEKSIGLISGEMLCPYPPGIPTIMPGEVITSEAIEYLLKIKQQGGIITGCSNKDLKTIKVICSKSTNYLDS

SEQ ID NO: 109 - protein, 754 aa, Thiomonas intermedia
MHFRFPIVIIDEDFRSENSSGLGIRALAQAIEKEGMEVLGVTSYGDLSSFAQQQSRVSAFILSIDDEEFATAEEGVEPKALHNLRAFIEEIRFRNAEIPIYLYGETRTSGHIPNDILRELHGFIHMFEDTPEFVARHIIREARSYMDSLAPPFFRALVGYAADGSYSWHCPGHSGGVAFLKSPVGQMFHQFFGENLLRADVCNSVDELGQLLDHTGPVAASERNAARIFHADHLFFVTNGTSTSNKMVWHSTVAPGDVVVVDRNCHKSILHAIIMTGALPVFLTPTRNHYGIIGPIPLAEFHPDNIARKIAENPLTRHLVGKIKPRVLTITQSTYDGVLYNVDTIKQMLDGHIDTLHFDEAWLPHACFHDFYRGMHAIGPDRERTKEAMVFATQSTHKLLAGLSQASQILVQNAQNQQLDFHRFNEAYLMHSSTSPQYAIIASCDVAAAMMEPPGGTALVEESILEAMNFRRAMRKVDADYGQDWWFKVWGPNGLAEEGTGERDDWLLHATDDWHGFGAVADGFNMLDPIKSTIVTPGLNINGDFDATGIPAAIVTRFLAEHGVIVEKTGLYSFFIMFTIGITKGRWNTLVTALQQFKDDYDRNQPLWRILPEFVAQNPRYERIGLRDLCQQIHEAYREQDVARLTTEMYLSDLQPAMTPTDAYAKMAHRDIERVEIDQLEGRITAALVTPYPPGIPLLIPGERFNAPIMRYLKFARDFNLRFPGFVTDVHGLVTETDASGNKRYFVDCVRNPD

SEQ ID NO: 110 - protein, 468 aa, Synechococcus sp.
MALLPLLHRDVGRPLFLPAHGRGSALPPAMRRLLQRPAGLWDLPELPALGGPLENDGAVADSQRAAADAMGVNRCWYGVNGATGLLQAALLGISRPGEAVLMPRNAHRSLIQACLLGQLTPLLFDLPYQPDRGHPAPADGPWLESVLAALPAKHPPISAAVLVHPTYQGYGLDPAPLIRSLQHQGWPVLVDEAHGSHFAADVDPELPPSALQGGADLVVHSLQKSATGLAQTAVLWQQGERVDTDALQRSLGWLQTTSPSALLLASCEAALHHWRSSAGRRQLRQRLMQARTLRDQLRRDGLPLLTTDDPLRLVLHPGRAGISGLDADDWLLPRGLVAELPEPATLTFCLGLADQRGLRRSLRRAWQQLLNAHPARAPQPPLLPPPLPLVAQPEVPLAEAWRAPRRLCVLEQAEGTIAADLLCPYPPGIPLLVPGERLDGARLHWLLEQRQLWGDQIPARLAVLSEIA

SEQ ID NO: 111 - protein, 805 aa, Actinobacteria bacterium
MVNGTVMLALRENPLGGGVSAEQLRRIGKELERHGLELRWAADARDARATLQTEVGIAAAVVAWDLPAGRARGGGSRGPEADDGSGEAAARAGEAGDDRTPAVGADVLAHIRRRFKDLPVFLVMTDDSEHDLDRLPLWVSEAVVGYIWPLEDTPAFIAGRVATAARTYHKEILPPFFRALRRFDDAHEYSWHTPAHSGGVAFLKSPAGRAFFDYYGERLFRSDLSISVGELGSLFEHNGPIGEAERNAARVFGAERTYFVLHGDSTADRMVGHYSVTADEIALVDRNCHKSVLHGLVISGARPVYLVPTRNGYGLAGPLPPAEIAPSGVAARIAANPLTPGAVSADPQYAVVTNSTYDGLCYDTVAAARALAPSTPRLHFDEAWFAYARFHPLYAGRYGMAVGPDTFEGPDRPTVFATQSTHKLLAALSQCAMVHVRPAPRAPVEHERFNEAFMMHGTTSPLYPAIASLDVATAMMDGTQGQWLIDEAVTEAIRFRQAVVRTGRRIAAAGDRPDWFFGAWQPDTVTDPATGATMPFAEAPTALLARDPGCWQLAPGAPWHGFRDLADGHCLLDPVKVTLTCPGVTATGATQEWGIPARVLTAYLATRGIVVEKTDSYSTLVLFSMGITKGKWGTLMDALMDFKNLYDSDAPLDGVLPELVEQFPRRYARTSLRALCLQMHEHLTRADFISSLDTAFQQLPLPVHPPQHCYRQLIRGGTERLRLADAAGRVAAAMVTVTPPGIPVLMPGESTGATDGPLLRYLRALEAFDRAFPGFHSEAHGVTVDSETGDYLIECLRRPEEPAGR

SEQ ID NO: 112 - protein, 465 aa, Prochlorococcus marinus
MSISSFLSKKFLKSLFFPAHNRGKALPKGLIRLLKKQPGFWDLPELPEIGSPLSNSGLIHDAQISISKKVNAKKCFFGVNGASGLIQSGIIAMANPGEYILMPRNVHISVIKACALQNIIPIFFDIEFSRVTGHYMPITKRWFTNVFNNIDFDNFKIAGVILVSPYYQGYATDLEPLIKICHLHNLPVLVDEAHGSYFLFCENFNLPKSALRSKADLVVHSLHKSLNGLTQTAIIWHNGYLVEENKLIKSINLLQTTSPNSLLLSSCEESIKDWLNKDNLNKYKKRILEAKSIYNELIKKKIPLIETQDPLKIILNTSKVGIDGFTADRFFYKNGLIAELPEMMTLTFCLGFSNQKDFTFLFQKLWKKLLIHTNKSYGLKAIKPPFRIVQSPEIPIGVAWKSKSISIPLVESLGKISGDIICPYPPGIPLIVPGERIDKERIDWIEAQSLYNEDLLNSYIRVLNN

SEQ ID NO: 113 - protein, 745 aa, Pluralibacter gergoviae
MNIIAVMSDKGAYFKDEALSELHQQLEHEGFRLAYPTDRHDLLKLIENNARLCGVIFDWDTYNMELCSQISDLNDRLPVYAFANNNSTLDVTMNDLRLNVRFFEYRLGSAEDIAVKIRQSTDDYIDSILPPLNKALYKYVQEEKYTFCTPGHMGGTAFNLSPVGSLFYDFFGENTMRSDISISVGELGSLLDHTGPHREAEEYIAHTFNAERSYIVTNGTSTANKIVGMYASPAGATILIDRNCHKSLTHLMMMSNVVPIYFRPTRNAYGILGGIPKKEFTRESIEALVKKTPNATWPVHAVITNSTYDGLFYNTNYIKKTLDVKSIHFDSAWVPYTNFSPIYDGHAGMSGDRVEGKVIYETQSTHKLLAAFSQASMIHVKGAINEETFNEAFMMHTSTSPYYGIVASTEMAAAMMRGKTGKRLINGSIERAINFRKEIRRLRSESEGWFFDVWQPDNIDDVACWPLNPRNAWHGFNNIDDDHMFLDPIKVTILTPGMSPDGTLEEKGIPASIVSKYLDENGIIVEKTGPYNMLFLFSIGIDKTKAMSLLRALTDFKRIFDRNVFVKHVLPSLYESAPEFYKEMRIQELAQGIHDLTRQHNLPDLMYRAFEVLPEMVITPHDAFQEEVRGNIEMVDLNDMVGKVSANMILPYPPGVPVILPGERITKESMPVLNFLQMLCDIGEHYPGFETDIHGVIRDEETKRYRVVVLKPGTDQPGDKPSDTVKKDPEVKKEPMKVKTKAAGK

SEQ ID NO: 114 - protein, 712 aa, Francisella sp.
MRNILFVYSKKLPVHKLEFLQNLESNLIKENYDCLLTTDLNTAAEIVKSNNRVASIILDWDHFELSAFEKLADYNPNLPIFAIGDNHLDIELNLVDFELNLDFLQYDAVLLNDDIEKIINGIDAYYKAIMPPFTKQLMHYINESNYSFCTPGHQQGHGFQKSPVGAAFYDFFGPNVFKSDISISMEEMGSLLDHSGPHKEAEDYVADIFNADRSLIVTNGTSTSNKIVGMYSAGQGDTILVDRNCHKSLTHLMMMVDVNPIYLKPTRNAYGIIGGIPLSEFTSASIEKKLSDHPVAESWPRYCVITNSTYDGIFYNVNKVHQELDVVNLHFDSAWVPYTNFHSIYEGKYGMSIKPKLNHTIFETQSTHKLLAAFSQASMVHVKGHYDNEKLNETFMMHTSTSPFYPIVASCEVSAAMMKGKLGQSLINDCINYALDFRKEIVKLKEESLDWYYDIWQPENIDEQQAWPIDTSSSWHGFNEVEDDYLYLDPVKVTVILPGIDKEHNLEKKGIPASIVAQFLEDHGIIVEKTGPYTMLFLFSIGITRAKSMKLLATLNKFKQMYDQNRLVKDVLPTIYSKHPDFYENIKIQDLCEKQHGLVVKHNLPQVMFHAFDKLPEYTMSPYQAYQKLNKGDVVKVCLDDLLGHTSAVMVLPYPPGIPLIMPGERITLESKVTLDYLLMLKDIGAELPGFEYDIHGLEKGDDGKLYIKVII

SEQ ID NO: 115 - protein, 442 aa, Carboxydothermus pertinax
MAELINKLKIHLNKKPVSFHMPGHKNGRFLPKKVKNLLGEKYFSADVTELPGLDNLFTPEGVLLNLEAKIARYFGFPRAHLSVNGSTAAVLALMLSFFKPGEKVVVDRMSHISLYHGMVLGDLLPEFIYPDWDDEYGLPVNKNPNTNAKAYFLTNPDYHGLVRDLSELKTAKIFLDAAHGGLIPLWRKDFFQNIDGFAVSLHKTGPFPNPLAAVVYWDEKVEVKRALNLVQTTSPSYPLMAAAEGGVDMLLQSGRRAMQKAVEVAQLFKESLKKRGIGFLQAKYSAEPLKVTLKAQDLGMSGEKIANVLMKKGIFPEAYGPGYVLFMLSPGNTENEVKKLLKVIDSLKGTKQRIMLPKNPFQGQSKLKLTPREAYYAKEKWVELQDAAGKIARDGVTLYPPGAPVLYPGEEITREAVAYINYHLKLGLTVTGIKDGRIRVIR

SEQ ID NO: 116 - protein, 484 aa, Thermoactinomyces sp.
MENQEKTPIYEALLHHKDKKTDSYHVPGHKQGANFLDHKDNLFQSILQIDQTEVTGLDDLHHPSGVIARAEYLAAEAFGAEKTFYLVGGSTAGNIASILTMCLPGDKVILQRSCHQSVFHGCMLAGVSPIYWKDAYHSDTGFERPLDLDWLVQKCRHEMVKLVVMTSPSYYGMVQPIRKIADICHQFDVPLLVDEAHGAHFGFHPNLPNSALSQGADLVVQSTHKMLGSMTMSSMLHVGSSRVRINDLERQLRIVQSSSPSYPLLASLDLARKQVAVNGYHLFGRLLTEIDQFKKDTFPYCKWVQELSLHHLKCQDPCKMVIASSGQMTGFEMQAFLEDKGIYTELADDRRVLFCFSLGHPEGSLIRLKKVLLELDCWLDSCENRLSERDSIVLRLPSTTEFVLPFQDIRKHQHVRLCLEDAIDGIITEPIVPYPPGIPVLLPGERLTCEWMEYLRGADRAGYRIRGLYQDQLTSEVRVNIVFV

SEQ ID NO: 117 - protein, 783 aa, Fusobacterium nucleatum
MSKLDQNKTPLFTVLKDEYVRRNILPFHVPGHKRGKGVDKEFFNFMGEAPFSIDVTIFKMVDGLHHPKSCIKEAQELLADAYGVKHSFFAVNGTSGAIQAMIMSVIKAGEKILVPRNVHKSVSAGIILSGSEPVYMNPEIDENLGIALGVKPQTVENMLKQDPDIAAVLIINPTYYGVATDIKKIADIVHSYDIPLIVDEAHGPHLHFHDELPISAVDAGADICTQSTHKILGAMTQMSVIHVNSDRVNVEKVKQILSLLHTTSPSYPLMASLDCARRQIATQGQELLTRTIELAKYFRREANRIPGIYCFGEELIGKDGFFAFDPTKITISAKELGLKGGELESLLVDDYNIQMELSDYYNTLGLITIGDTEESVNKLLDALRDISRRFFGKGKKLEKNIIKLPETPELVLMPREAFYSEKNKVPFKESVGKISGEMIMAYPPGIPIIIAGERISQDIIDYIEELKEADLHIQGMEDPELETINVIEEEDAIYLYTEKMKNILIGVQTNLGVNKTGTEFGPDDLIQAYPDTFDEMELISVERQKEDFNDKKLKFKNTVLNTCEKIAKRVNEAVIDGYRPILVGGDHSISLGSVSGVSLEKEIGVLWISAHGDMNTPESTLTGNIHGMPLALLQGLGDRELVNCFYEGAKLDSRNIVIFGAREIEVEERKIIEKTGVKIVYYDDILRKGIDNVLDEIKDYLKIDNLHISIDMNVFDPEIAPGVSVPVRRGMSYDEMFKSLKFAFKNYSVTSADITEFNPLNDINGKTAELVNGIVQYMMNPDY

SEQ ID NO: 118 - protein, 493 aa, Acholeplasma palmae
MKKLNQLETPFFTKLKEYAESDTVPLDVPGHKLRNIEDDFLKYIGNNALRLDSNAPRGLDNLSKPKGVIKEAEALMADAFKATHAHFLVNGTTQGILAMIMATCRAKEKIILPRNVHKSVINALILSGAIPIFILPELDEDLGIANQISFSALEKTILEHPDAKAVFIINPTYFGVTADLEKIVNLAHENDMLVLVDEAHGAHFSFNDKLPLSAMEANADIASCSLHKTVGSLTQSSILLTKGDRIDQERLKSTLNMIQTTSPSSLLMASLDVSRKTIYQHGQKSFDHLLSMLDKTRENLNQIPNVKAFAKDYFIDRGYKDYDQTKLIIKVSEMGLTGFEVYQILSDVYHIQLELAETHLVLAVLSMGTRQEDLDRLTYALKELSDQHKGKEALEFEIIKRLPETYIRPRDAYHAPKKLVLLEEAIGEVSAESLMIYPPGIPLVIPGEIIDKQVIEDLNFYEKQGSVILSDTKAGYIKVVDKEEWEKWSEKDI

SEQ ID NO: 119 - protein, 490 aa, Geobacillus kaustophilus
MSQLETPLFTGLLEHMKKNPVQFHIPGHKKGAGMDPEFRAFIGDNALAIDLINISPLDDLHHPKGMIKRAQELAAEAFGADYTFFSVQGTSGAIMTMVMSVAGPGDKIIVPRNVHKSVMSAIVFSGATPIFIHPEIDKELGISHGITPQAVEKALRQHPDAKGVLVINPTYFGIAGDLKKIVDIAHSYNVPVLVDEAHGVHIHFHEDLPLSAMQAGADMAATSVHKLGGSLTQSSILNVREGLVSAKHVQAILSMLTTTSTSYLLLASLDVARKQLATKGRELIDKAIRLADWTRRQINEIPYLYCVGEEILGTEATYDYDPTKLIISVKELGLTGHDVERWLRETYNIEVELSDLYNILCIITPGDTEREASLLVEALRRLSKQFSHQAEKGIKPKVLLPDIPALALTPRDAFYAETEVVPFHESAGRIIAEFVMVYPPGIPIFIPGEIITEENLKYIETNLAAGLPVQGPEDDTLQTLRVIKEYKPIR

SEQ ID NO: 120 - protein, 388 aa, Desulfotomaculum ruminis
MKEFFKLPWGKVEGLAQEYGTPLLILSLKQVEHNYEFLRQHLPGVKIFYAIKSNPDLRLVQKLAEMDCSFDVASEGEITSLVSMGISPDRMVYANPVKTYKGLETAGKTGVRDFTLDSESEIYRIARSNPQARVLVRIRVDNNHSLVDLNKKFGADPKDAIPLMLLAIQEGLEVAGLCFHVGSQNTSADAYLDALSISRRIFDDAALQGIHLKILDIGGGFPIPTGDLNMDMASFMDQIHYGLQSLFPDTEIWAEPGRYLSGTTMNLITRIIGSQIRNGRQWYYLDEGIYGTFSGILFDHWEYEMEVAKTKKGPEIEATFAGPSCDSLDVVFKDYKTPPLEIDDLVLVANCGAYSSASATTFNGFAKAETVIWEEVEEKLQEEIKAVS

SEQ ID NO: 121 - protein, 789 aa, Escherichia coli
MKFNHNLLFISSQYLDGDNPSQQVLEELQTELAERGFKIHITHQISDGLKIIEKSPQYSGIGFYWEPDNPTFAEELQHFISIFRKRNATTPLIIFSEQNITDRIPLDVLKEVSEYVYLFSESAAFTANRLYSLVHRYADKLLPPYFKTLKDFTEDGDYYWDCPGHMGGMAYLKHPVGIEFINFFGENMMRADIGVATAEMGDYLIHAGPPKKSEEIAARLFGSDWTFYGVSGSSGSNRIVAQAAVGADEIAIIDRNCHKSLNHGLTLSQARPVYLKPTRNAWGLIGPIPTGRLKKASIDALVANSRLASGAVSQSPSYAVVTNCTYDGFCYNVNDVVRHLGESAPRIHFDEAWYAYARFHPLYQSRYAMDAEETPNRPTLFAVQSTHKMLPSLSMASMIHVKKSDRAPLNFDDFNDAFMMHGTTSPYYPIIASIDVAVSMMEGESGYSLVQESIEEAIAFRKAVVSVKRQLQEQEGGDAWFFDVLQPTEVQDSDSGQRYSFEEAPVSLLSHSADCWSLRSGERWHGFADDDLVETNSMLDPVKVTLTCPGIGPKGEYQKNGIPGYLLTRFLDDRRIEIARTGDYTVLILFSVGITKGKWGTLIESLLAFKKHYDNDDLATDAIPSLKAHSPHYDTLTLKELCQIMHEKMDELELMSHINDAVNTDPEPVMTPAEAYQKVVRYKTEHIRLDDFSGRIAASMLVPYPPGIPVLMPGERMPQGNKGIIGYLRALQEFDKQFPGFEHEIQGVNVDENGDFWVRAIVEEERDGQSLPGHITFKRQVSGIKKGRQ

SEQ ID NO: 122 - protein, 393 aa, Selenomonas ruminantium
MKNFRLSEKEVKTLAKRIPTPFLVASLDKVEENYQFMRRHLPRAGVFYAMKANPTPEILSLLAGLGSHFDVASAGEMEILHELGVDGSQMIYANPVKDARGLKAAADYNVRRFTFDDPSEIDKMAKAVPGADVLVRIAVRNNKALVDLNTKFGAPVEEALDLLKAAQDAGLHAMGICFHVGSQSLSTAAYEEALLVARRLFDEAEEMGMHLTDLDIGGGFPVPDCKGLNVDLAAMMEAINKQIDRLFPDTAVWTEPGRYMCGTAVNLVTSVIGTKTRGEQPWYILDEGIYGCFSGIMYDHWCYPLHCFGKGNKKPSTFGGPSCDGIDVLYRDFMAPELKIGDKVLVTEMGSYTSVSATRFNGFYLAPTIIFEDQPEYAARLTEDDDVKKKAAV

SEQ ID NO: 123 - protein, 770 aa, Erwinia pyrifoliae
MLDFNLTFAGTVSCLALFVSVSLLPGYPYVAARRRVWIRQNSLENVMNIIAIMGPHHVFYKDEPVRELDVALKRQGFHTVHPQGAEDLLKLVEHNPRICGVVFDWDEYSLDLCSEINQLNEYLPLYAFINTDSTMDVGVNEMRMAIWFFEYALNAGEEIAQRIRQYTDEYIDTITPPLTKALFNYVKEGKTTFCTPGHMAGTAFQKSPVGSLFYDFFGANTLKADISISVSELGSLLDHTGPHLEAEEYIARTFGAEQSYMVTNGTSTANKIVGMYAAAAGSTVLIDRNCHKSLTHLLMMSDIIPVWLKPTRNALGILGGIPKREFTKESIALKVAQTPRASWPLHAVITNSTYDGLLYNTQYIKETLEVPSIHFDSAWVPYTNFHPIYRGLSGMSGERTPGKVIYETQSTHKLLAAFSQASLIHIKGDYDEQTFNEAYMMHTTTSPNYAIVASIETAAAMLRGNSGKRLINRSVERALHFRREVQRLREESDGWFFDIWQPDGVEEPECWAIQPGDEEWHGFRDADADHMYLDPIKVTILTPGMSEMGEMAEEGIPAALVAKFLDERGVVVEKTGPYNLLFLFSIGIDKTKAMSVLRGLTEFKRAYDLNLRVKNMLPDLYAEDPDFYRNMRIQTLAQGIHSLIRQHDLPRLMLQAFAMLPEMKLTPHQMFQQQVKGNVETVDISQLIGRVSANMILPYPPGVPLVMPGEMITAESRPLLDFLLMLCTIGRHYPGFETDIHGAKLTEVGQYLVRVLKHDGEVQAAGNAVV

SEQ ID NO: 124 - protein, 708 aa, Haemophilus somnus
MKQILIGYSMYNDHLQNLISALEEKGYKTTAVDGHQEILHAVKNNASIISVILSNDIIDKDLTDKILLLNEDLPIFSLKDTDDLNENLDFATIGHHVQFVDCNLYTLDEIIHKIERAVEKYFDSITPPLTKALFKYVNEDKYTFCTPGHMGGTAFLRSPIGSVFYDFFGKNTFKSDISVSVGELGSLLDHSGPHKEAEKYIANVFNADRSYIVTNGTSTANKIVGMYSAPSGSTVLIDRNCHKSLTHLLMMSDVTPIYLKPTRNAYGLLGGIPEQEFSKSAIEKKLADIDNPNWPVHAVITNSTYDGLFYNTDKIKETLDVKSIHFDSAWVPYTNFNPIYEGKTGMGGKRVEDKIIYETQSTHKLLAAFSQASMIHIKGQINEETFNEAYMMHTSTSPHYGIVSSTEVAAAMMKNNTGKQLLQDAITRAVRFRKEIKQRMRESQSWYFDVWQPENISSTECWELKPGESWHGFTNIDKHHMYLDPIKVTLLMPGLNKDNTLDPNGIPATLVSNYLDSKGIIVEKTGPYNILVLFSIGIDDTKAMSLIQALDDFKSLYDANVLVKDILPNIYAHAPKFYETMRIQELAGGIHRLICKHNLPDLMFKAFDILPKMIMTPNKAFNLELKGNIDECYVEDMVGKINANMILPYPPGVPLIMPGEMITEESRAILEFLVMLCEIGTHYPGFETDIHGAYRQDDGRYKVKIINI

SEQ ID NO: 125 - protein, 2490 aa, Plasmodium malariae
MNSVNDSMYSGDTNSLHVNSLYENNPDKSVKNINAVNDYITSSNAMSEEAETAAGNDELIPNSSSNHIHSQYKHRHQYKQYHQYNPHNQHKQHHQYKKLHPYKQYHQEKELPKYQPLPQYQHSTQYQGSKPHSQSQLHDGGKKRREKGKVERNKYDKIEELEKYININNATNVCSLRIKLWEALMLYVNNLKIELVYFIIYCLEEIEVYWGEEATDNLRDIINLINDKKYKEVLNKIGETLSSLSVTTGKTTEENPFFYTLIVSGRRDENNNNNNNNSNNNYNYNNNNSDLGCELNKILHYEHNRLSNQSNNKKLEYKIIEASNAKEALLACLINPQILSVVLVDNLTIDEEKVKERDYYKFNEDNMLNANCANSSYLLNCNLQNNTQMVMKNPLNHNGMMHSGGVTTVQNSKDVLLIGNSMLPEYLNNNNVNINENSNVRSLRSLYIKRNYKFDIGDFVIGYEQLVSAPLEKMKKGFNILVILIKSIAYIRSSVDIFCVCTSITLDKLHSVNNKIIRIFTTHDDHSDLHESILDGVKKKIKTPFFNALKAYAERPIGVFHALAISKGNSVRRSRWIQSLLDFYGVNLFKAESSATCGGLDSLLDPHGSLKEAQIMAARAYGSKYCFFVTNGTSSSNKIVMQALVKPGDIILVDRACHKSHHYGFVLSQALPCYLDPYPVSRYGIYGAVPIYVIKKSLLDYRNSNKLHLVKLLILTNCTFDGIVYNVKRIIEECLAIKPDLIFLFDEAWFAYACFHPILKFRTAMTVAEKMRSKEQKRIYYKVHKKLLKKFGNVKSLNQVSADKLLKTRLYPNPSEYKIRVYATQSIHKSLTSLRQGSVILISDDNFESHAYTPFKEAYYTHMSTSPNYQILATLDAGRAQMELEGYGLVEKQTEAAFLIRKELSEDPMISRYFRILNAEDLIPDSLRQCAVSYMKRKKKIIKEYDSSDSRCSANVTYSCVSNNNTRGIVDPSDSGKYYLSGEQNVVHSVNASSFECVRGTNGATNSNHTNNSTTSNNRANSPARNCHVKSPTSNYHTNNCPTSIHIGTSVMLSNTNSNNIVQGNNNNNVKSSNNSPRSALNGVAAKSTEIVESYTSCNIYSEDSDYQKVSKSGNIKRYIKKKKNQNCREAPCVSYDGSNFSGANSENCENCENSKKSRNSRNSQNSRNSRNSQNSQNSENENLSFLENSNNKRYNNSYGYSSGLKNFLEYFECSWLSEDEFVLDPTRITLFTGYSGIDGETFKVKWLMDKYGIQINKTSINSVLFQTNIGTTGSSCLFLKSCLSLISQELDQKKSLFNERDLNQFNENVFNLVSNYIDLSEFSEFHPLFKKRYTDPKIFNKEGDIRKAFYLAYEEDYVEYILLSDLKERIRQNEMIVSASFIIPYPPGFPVLVPGQIVSQEIVDYLSGLSVKEIHGYDENIGFRCFYNFVLEYFYNMVISDPYSLYQKIDKETYEKLKHMSLSKRKSLESVCYLYIYDNESNKMKKVYLCSGNVSTENNTIVSDTCDEITQNHARRSYNKKGKQTSIYENFSKSAQNAGNASGVGNVSGKIGNIIYGDNFNNCANGKDICHHLYGKEEEGFFDVNDENAFGNDVLHLNHYAIKNPLKKGTTETFIKKTCNQKSSWKEKITDKYHGTPNGTRRDKHNVLSSKKKENGRKCKGIQVNNNNNNNNVILINSESYDHDQKVIDLVDTPEKSNKNYECHEHDGRDNDDDDDRHSGGGSNYNRDSSNNSHNVDRKRYVVGTDKHSGSSNTHNVGTDKHSGGSNTHNVGIDKHSGGSNTHNVGIDKHSGGSNTHNVGTDKHSGGSNPHNVGTDKHSHSGSSNNNKRSLERKKKRNEGNYMSLSYKANIYGHKVVFNRGNNNNDDANVKAYNEKDGKGGERNNNCTFYDKNVNGMNRERSLKNISYMSNISEIRGMNNVNNVRRKNRIDEGKNRNIKGTDDSDYLLSEVTANMSKNIGPISDIYSLKKISKLNRSDDGKYENSLSDYVPKLKSSNIVIYNKVKKNALLMGRKHMSDGKSRNNHHRKNSHMNQKSNKDYVYYSDSSKKINEIIYMKRQDGDLTEENAIVKENLNELNSNLFYSNGTGNKGGDIKGPEKNSSNNSGTLSGTNNGNNSNSSIQNFANVNEKAGGITFTTPNIVADEYCDKKEIPIKRGNNSGDNNGLNSGLNSGYNSGHNGVHNSCNDSSNKPIINEGTGYNNSYHSDQDANKSNEEKYKSNGLIRPNNLERNIILGNEIIVEKDNNLSYRNISGHNLNETNSYVYANDGTIAEGHYGNNNMARGSNIGCSDDIEGSEDIEGGEDIEGGEDIEGGEDIEGGEDIEGGEDIEGGDDIEGSYNIRSSSNIYMGNSNAISDVAQVSGSVNDANISNLMGHVKDEIGFCGKNFLYSENELKMNALLREEEKDKSTIRNLNTLNNNSYINNLITNVDDDTFIHKEGNFFLECTLTNSEMNCSSFEMDMSLNNIYPNGGEHVKQHRKYDDDLKKEF

SEQ ID NO: 126 - protein, 1990 aa, Plasmodium gallinaceum
MKIVLIKKIKNINAINDYINNNAMSEEIESSNSNQDLSSSNPLNLARRNKKEKIKLEKNKYDKIYELEKYININNATNVSSLRIKLWEALLLYINNLNIELVYFIISCLEKIEVYWGQEATDNLQEIINLINDKKYKDVSNKIGETLSSLSVTTGKTAEDNPFFYTLIVSAKRDENSHNYNSDLACELNKILQYEHNRLSNQNNNKKLEYKIIEVSNAEEALLACLINSQILSVVLVDNLTIDEENSKEKEYFNFTEENSLNNNCANNSYLNCNGTNNTNKTSLTHSMHNGSTSNNKDVRNIQNYRNNSNNNMNENKKVNGFIKNDYKFYIKDFVLGYEQLVHAPVEKMKKGFNSLVILIKSIAYIRSSIDIFCVCTSITLDKLQSVNNMIIRIFTTHDDHSDLHESILDGVKKKIKTPFFNALKSYAERPIGVFHALAISKGNSVRRSRWIQSLLDFYGVNLFKAESSATCGGLDSLLDPHGSLKEAQLMAARAYGSKYCFFVTNGTSSSNKIVMQALVKPGDIILVDRACHKSHHYGFVLCQALPCYLDPYPVSRYGIYGAVPIYVIKKTLLEYRNSNKLHLVKLLILTNCTFDGIVYNVKRVIEECLAIKPDLIFLFDEAWFAYACFHPILKFRTAMTVADKMRSKEQKKIYYKIHKKLLKKFGNVKSLNEVSAEKLLKTRLYPNPSEYKVRVYATQSIHKSLTSLRQGSIILISDDNFESHAYTPFKEAYFTHMSTSPNYQILATLDAGRAQMELEGYGLVEKQAEAAFLIRKELNDDPMISRYFRTLNAEDLIPDSLRQCAVSYIKKKKKMKDYDSSDSKYSGNITYSCNSNSQVKGLDPSENLKYPIKNMSISYEYINASNAINNNNVFLQNEFTNNNAHGNSNTEVNNVCRSNNSPSSILNNKNERSIDLHEKNNSTNTYNDNSQTKINSSLKKKKKKNDKTLNSITYDSNFSEDTYNNLSFLENRNKNYNNSSYSGGMKNFLEYFESSWLSEDEFVLDPTRITLFTGYSGIDGDTFKVKWLMDKYGIQINKTSINSVLFQTNIGTTGSSCLFLKSCLSLISQELDQKKSLFNERDLNQFNENVYNLVSNYIELSEFSEFHPLFKKKYANPNIFNKEGDLRKAFYLAYEEDYVEYILLGDLKERIKQNEMIVSASFIIPYPPGFPVLVPGQIVSQEIVDYLSGLSVKEIHGYDENLGFRCFYNFILDYFFNMDITDPYSCYQKIDKKTYNQLKFMSLSKKKNIENIYDMYIYDNETNKMKKLYLCNGKIFKENNIPMNVNYNFDSYQENANNNVIGIYENLNNNVIMPNISENNTNNCINNGVSNNLNDSEENIYQLNENEANNNILQFNKGSITSPKKMSTESIIQNTSNDVLLEEKKMIKFYDNVNNIKNGEYNIFLNKIKEENELKYENEVYGNNHNNNKLLLNFNKIHSENYYSQTKFKNLIYNSNNYKKNYRNYKFHNNNRNYGNKNYIKEQNRDFNNSISYIRNSNINMNVINTNDNNRNDNSLTENNLNNEEKRNIVNKNNNTIYDNGNSDMNNMNSNFINDENNNICNTNNNFINDTNNINTNNNFVKDCDNNINNMNNNIINNMINNMNNCMNNNNLNSDNMPSFSDVFYRKKTNKFNKSDDGIYSNKLTDFVPKLKQSNIILYNKIKKNALIMQKEQENNMNYLNDCHLKNNYLNEKNNKDNEYYSDSSKKVNENISIKDENDNFQKKNKCVKRDSLEYNFNKIENNDNEKNNIMYTANCISNMNIDKEDIYNNNNNYVNNNTTNINENLGYNINYYPDQNINENIEEICKTNELSIRESERNNLNNEILDKNEFCNINNHVTNINSLNNYNYDNDEMINEMNYNNQNVNENNNNNINNHIKNELTYNGNNFNYQENEIKKNSILRENEIDKNSRKSNTLNNNSYINNLITNVDDDTFVHKQGNFFLECALTNSEINCSSFEMDVSLNNIYSNGESIKQHRNYDNDKKKNEFK

SEQ ID NO: 127 - protein, 465 aa, Prochlorococcus sp.
MRLTALLTTKRGKNLFLPAHGRGNALPMEIKALLKNKPGLWDLPELPDIGGLGLSEGAIEIIQQECASSIGAKKGWFGVNGATGLLQASLLAIAKPKENVLMPRNIHRSVIHACILGDINPVLFDLPYLEDRGHYKPADVDWFQDVLNALEKENIVISAVVLTNPTYQGYSVNLRPLITLIHNKNLPVVVDEAHGAYFSSCLDSDLPQSALKAGADLVVHSLHKSANGLVQTAALWWQGSMVDPYIVQRCIHLFQTSSPSALLLASCEAALNELRSEYALEKLKIAILKARFINDRLRKLGVPLLDNQDPLKLILHTAAQGISGIDADPWFINRGLVGELPEPGTITFCLGFARHQGIVRSIKNNWDKLISSGLPMDSYPPFEKPPNPFVKALSSSSLSAFRGDSEIVPLSKSVGRISADLISPYPPGIPLLFPGEILTSELVEWMLIQKKIWPQQISSQIRVVN

SEQ ID NO: 128 - protein, 393 aa, Selenomonas ruminantium
MKNFRLSEKEVKTLAKRIPTPFLVASLDKVEENYQFMRRHLPRAGVFYAMKANPTPEILSLLAGLGSHFDVASAGEMEILHELGVDGSQMIYANPVKDARGLKAAADYNVRRFTFDDPSEIDKMAKAVPGADVLVRIAVRNNKALVDLNTKFGAPVEEALDLLKAAQDAGLHAMGICFHVGSQSLSTAAYEEALLVARRLFDEAEEMGMHLTDLDIGGGFPVPDAKGLNVDLAAMMEAINKQIDRLFPDTAVWTEPGRYMCGTAVNLVTSVIGTKTRGEQPWYILDEGIYGCFSGIMYDHWTYPLHCFGKGNKKPSTFGGPSCDGIDVLYRDFMAPELKIGDKVLVTEMGSYTSVSATRFNGFYLAPTIIFEDQPEYAARLTEDDDVKKKAAV

SEQ ID NO: 129 - protein, 652 aa, Aquitalea magnusonii
MTPVSRVLVVSDDAKWQSDVLAGLGAVAVRLENPYGLTFIGASRLKEAMDIIRRDGDIQAVLVDKQLQEKGLNQAAVALANQISDFRPELSLYVLLMDDDERVLVENLASHAVDGYFYRDETDYNGWFRILTAELAEKSATPFYDKLKQYVRMAKDSWHTPGHAGGDSLKGSPWVGDFYDFVGENMLRADLSVSVPMLDSLLHPTGVIAESQKLAAKAFGGRKTYFATNGTSTSNKVIFQTLLAPGDKLLLDRNCHKSVHHGVILSGALPVYLDSSINKQYGIFGPVPKATIFAAIEANPDARVLILTSCTYDGLRYDLVPIIEAAHAKGIKVIVDEAWYGFARFHPAFRPTALESGADYVTQSTHKILSAFSQASMIHVNDPGFDEHLFRENFNMHTSTSPQYNLIASLDVARKQAVTEGYRLLDRTLKLAEELRDKINSTGAFRVLELEDLLPEEMREDGIRLDPTKLTVDISQSGFTTDELQHELFERYNIQVEKSTFSTITLLLTMGTTRSKVSRLYDALLRLAKEKRAPRAVGRMPEIPRFSRLACLPRDAFYEAGERLPLLDDDGRPNAALNGRVCCDQIVPYPPGIPVLVPGQVIDDSILSYLARLQKTQKTIEMHGLAEDGGEMYVRVLKDRELSHLPDRLLFG

SEQ ID NO: 130 - protein, 716 aa, Serratia sp.
MNIIAIMRPEGVYYKDEPIRELDAALEILGFKTIYPRDRADLLKLIESNARICGVIFDWDQHSTELCVDINELNEYLPLYGFINTHSTMDVSVHDMRMVLYFFEYALNAAEDIAKRIRQYTDEYIDQITPPLTKALFKYVEEGKYTFCTPGHMAGTAFLKSPVGTLFYDFFGAKTLKADVSISVTELGSLLDHTGPHLEAEEYIARTFGAEQSYIVTNGTSTANKIVGMYSAPAGSTVLIDRNCHKSLAHLMMMTNIIPIYLRPLRNAYGILGGIPQREFTRDSIAGKVEQTKDASWPVHAVITNSTYDGLLYNTDYIKNTLDVASIHFDSAWVPYTNFHPIYDGKSGMSGERIPGKVIYETQSTHKLLAAFSQASMIHIKGDYNENTFNEAYMMHTTTSPNYGIVASAETAAAMLRGNPGRRLINRSVERALHFRKEIQRLREETDGWFYDVWQPEDIDEAECWPLNPDDNWHGFANADTEHMYLDPIKVTILTPGMDETGNLSAEGIPAALVAKFLDERGVVVEKTGPYNLLFLFSIGIDKTKSMSLMRGLTDFKRAYDLNLRVKNMLPDLYGEDPDFYRHMRIQDLAQGIHRLIIKHDLPSLMLKAFDVLPEMKMTPYEMFQHQVRGNIEECEIDQLVGQVSANMILPYPPGVPVVMPGEMITKESRAVLDFLLMLCSIGEHFPGFETDIHGARLTEDGKYWVKVLKKGVLDA

SEQ ID NO: 131 - protein, 481 aa, Eubacterium siraeum
MLSQERAPIYEALKEYRAKRIVPFDVPGHKMGRGNPELTEFLGRECMTVDVNSSKPLDNLCHPVSVIKEAEQIAAEAFGAKNAFFIVNGTTAAVQAMALAVAKRGEKIIMPRNVHRSAINALILGGAVPVYVNPGVNKELGIPLGMTVEDVEKAILENPDAKAVFVNNPTYYGVCSDIKKIADLAHAHGMYLLADEAHGTHFYFGDNMPLAGMKAGADFAAVSMHKSGGSLTQSSFLLTADTVNEGYVRQIINLMQTTSGSYLLMSSLDISRRNLALHGREIFAKVQSYAQYMRDEINEIGGYYAFSKELCDGGAFYDFDVTKLSIHTRDIGLAGIEVYDILRDRYGIQIEFGDIGNILAYVSIGDRELYLDRLIGALNDIKRIYSKDKTGMLDHEYINPIVKLSPQDAFYGNKKSVPIEQSSGKISGEFVMCYPPGIPILAPGEQITDEILAYIKYAGDKGCFLTGTQDLEIKNIMILDE

SEQ ID NO: 132 - protein, 750 aa, Allochromatium vinosum
MRFRFPVVIIDEDFRSENASGLGIRALAKALESEGLEVLGVTSYGDLTSFAQQQSRASCFILSIDDEEFGSGSPEEALEALATLRAFVQEVRLRNEDIPIFLYGETRTSRHIPNDVLKELHGFIHMFEDTPEFIARYVARESRVYLDSLAPPFFRALTHYAADSSYSWHCPGHSGGVAFLKSPVGQMFHQFFGENMLRADVCNAVDELGQLLDHSGPVAASERNAARIFNCDHLFFVTNGTSTSNKIVWHSTVAPDDIVVVDRNCHKSILHAIIMTGAIPVFLMPTRNHYGIIGPIPLDEFKPENIRRKIAANPFAKGIDAKPRVLTITQSTYDGVLYNVDTIKSLLDGEIHTLLFDEAWLPHASFHDFYTGMHAIGKDRPRCHESMVFATQSTHKLLAGLSQASQILVQESDQRQLDRDSFIEAYLMHSSTSPQYAIIASCDVAAAMMEPPGGTALVHESIMEALDFRRAMRKVDEEFGEDWWFKVWGPDYLAEEGIGDRDDWMLHADDHWHGFGELAPGFNMLDPIKATVITPGLNMDGEFSESGIPAAIVTKYLAEHGIVVEKTGLYSFFIMFTIGITKGRWNTMVTELQQFKHDYDRNQPLWRVLPEFIQAHPRYEKIGLRDLCDEIHGIYKANDVARLTTDMYLSDIVPAMKPAVAFAKMAHREIERVGIDDLEGRVTSVLLTPYPPGIPLLIPGERFNATIVRYLQFAREFNTRFPGFETDIHGLVKEENGGEVSYFVDCVRPL

SEQ ID NO: 133 - protein, 954 aa, Brevibacterium linens
MTGIDSDEHSGQASFVPGPAAAGGTPRKRLDSDSSGGSAETGFRSRPKKSQLERDPGMPASTWRLRSDAWEYLKFAIKRLAISGGDFSMIAADGEVWRSLRSLKTIELYWGGFGQRYVEDIAELLSNGEFDKAHDMITRAVNRLRGTTVPDVTEDDHLTEDERAEHKDRQDSRPRFEVLIVDETTEGGRDELHTDLLKLRHASDQFIYDYVIVPTADDAVAAALTNPNLLACVIRPGFTDRTRQVLSRDLRSAVELAHQGTTDSPTMPMSPLNSVRRVLRLADTLAGLRPELDLYLMAGAHIESLAGALTHRFRRVFRREDQFELHLSLLRRVQHLYDTPFFTAIREHARRPAGVFHALPVSRGGSVVGSKWISDFVDFYGLNLLLAETSATSGELDSLLAPVGTIKKAQSLAARAFGAKRTYFVTNGTSTANKIVHQAIVSPDEVVMVDRNCHKSHHHALMLTGARTAYLEAYPLNDVAFYGAVPLNRIKQLLLDYRAAGRLDEVRMITLTNCTFDGIVYDPYKVMSECLAIKPDLVFLWDEAWFAFARFHPVTRKRTAMVAAERLEDTLATDAHASAYREQQKRLYDPETGAPAPDEVWLEEDLLPPPDATIRVYATQSTHKTLTALRQGSMIHVYDQEFSSGAEEAFHEAYMTHTSTSPNYQILASLDLGRRQVEMEGFALVQKQLDLAMSLSSAIARHPLLKKTFKVLTAADLIPEEYRVTDRTMPLRDGLSTMWDAWARDEFVVDPSRITVEISGTGVDGDTFKHEHLMDRYGIQVNKTSRNTVLFMTNIGTSRSAVAYLIEVLVKLAGMFNDPHELRNEDALTEPAAVMPPLPDFSAFAPDYAAEVPADDPSKQLPDGDLRTAYYAGLRRQNIEYVLPHELRRRVEGGEKPVSAGFVTPYPPGFPVLVPGQVITAEVLDFMSALDTREIHGYDSRLGYRVILKEVLES

SEQ ID NO: 134 - protein, 647 aa, Gamma proteobacterium NOR5-3
MPEHRLPSCHAIIVSTDDAWRDTLCQRLVELEARGGEEHPCCELSISALATPDLLLEQARADGALQCVVLDAASLTDVTAIVTRLHRVRSEVDVFIAVSPGQAPADDNAELIDRDDTRAEILLRRLRRAIAKRASTPFADTLREYIDGARDAWHTPGHSSGDGLRESPWVADFYRMMGEHVFNADLSVSVQELDSLLEPSHVIHAAQDLAADAFGAKHTFFVTNGTSMANKVIVQHVLGNSGKMLVDQACHKSVHHAAIMSGADPVYLPASVNETFGLYGPVSKKTIYDAIAAHPDARLLVLTSCSYDGFYYDLEPIIRRAHAAGIKVLVDEAWYAHGYFHPDLRPCALECGADYVTQSTHKMLSAFSQASMIHVADPQFDESRFREHLNMHTSTSPHYGLIASLDVARKQMSMEGFTRLERCITHARELRRGISQTERFRVLELEDMLPDSLKDDGVRLDPTKLTIDVSRAGCSARALQKALYEKHSIQVEKITHNTLSVLVTLGTTQSKVLRLLNALRSLAREIPEKPLRLQPPSVLPAIGDIVARPREAYFGPSEDLPLSDEAHGINSGLIGRTSADQVVPYPPGIPVLVPGQRISEDVLDYLLDLYHGDSGIELHGLMRHEGRAMLRVTGNTDDEHSVTASTD

SEQ ID NO: 135 - protein, 716 aa, Legionella fallonii
MNDILIVYAKKIQDYKKHFVSLLEDCLIQKDYELTVCTSLRDAYEVSSLNPRIVAILYDWDDFGFSELHHFADHNKLLPIFAIANKHTSVDIELRDFDLTLDFLQYDASLLKESFKRILLAIEKYRQAILPPFTKALMSYLDELNYSFCTPGHLGGTAFQRTPIGATFYDFFGKNIFSADLSISIEELGSLLNHSGPQGEAEEFIAHVFGSDRSLIVTNGTSTSNKIVGMYSATSGDTVIVDRNCHKSIAQFLMMVDVIPIYLKPMRNTYGILGGIPESEYTEEAIRDKIAEHPDAKTWPVYAVITNSTYDGILYQVEKIQNQLKIPHLHFDSAWIPYTKFHPIYAKKFGLSLTPDKEQVIFETQSTHKLLAAFSQSAMIHIKGHFDEDILNANYMMHTSTSPFYPIIASCEVSAAMMAGNTGYYLINDAIELALDFRKEIIRLKKQSSDWFFDVWQPAQIKHAECFPLKFDETWHGFHHVSNDYLFLDPIKVTILLPGIKNDTLDDWGIPASIVEQYLESHGIVVEKTGPYSMLFLFSLGITRAKSMALLAALNKFKQLYDENASVKTLLPKLYQEHPEFYERMSIQTLTQKMHDLIKKHNLPSMMYHAFDSLPQVIMTPHRAYQKLIRKEIKLVPLEQLKGEVCAAMVLPYPPGIPLIMPGEQITDACHPILDFLLMLDDIGQALPGFSTEIHGVITGKDGKRYVQVIDGLYSS

SEQ ID NO: 136 - protein, 2075 aa, Plasmodium vivax
MNSANDAIFYGDKNSAHYNDLSESAADRCVKNGGIQNDYIMSNDVTSEGVDMAVEPGENGAGNAAYLHTPLHQHSPPHRGERKKKQYGKAERDKYDRIEEIEKYLNINNATNVCSLRIKLWEALMLYVINVNAELIYFIINCLMEVEVYWGEEATNNLQDILSLINDKKYKEVANKIGETLSSLSVTTGKATEENPFFYTLIVSSKRDENSNSYNSDLACELNKILQYEHNRLSNQNNNKKLEYKIIEVSNAKEALLACLINSQILSVVLVDNLAIDEDYKRERFEFYNFGEEASVNKCGAASPYGLNCGMVGGGMVGGGMIGGGMIGGGMVGGGAQMKPAFTHSAHNGSSSNSRDAMRNMILSNYRGCSGNNGSVCNNYCGGHCANNHYSSGSTVLNEHRKGANLLMKDYKFDIGNFVLGYEQLVAAPLEKMKKGFNSLVILIKSIAYIRSSVDIFCVCTSITLDKLQSVNNKIIRIFTTHDDHSDLHESILDGVKKKIKTPFFNALKAYAERPIGVFHALAISKGNSVRRSRWIQSLLDFYGVNLFKAESSATCGGLDSLLDPHGSLKEAQIMAARAYGSKYCFFVTNGTSSSNKIVMQALVKPGDVILVDRACHKSHHYGFVLSQALPCYLDPYPVSRYGIYGAVPIYVIKKTLLEYRNSNKLHLVKLIILTNCTFDGIVYNVKRVIEECLAIKPDLIFLFDEAWFAYACFHPILKFRTAMTVADKMRNHDQKMIYNKVHKKLLRKFGNVKSLNEVAAEKLLKTRLYPNPAEYKVRVYATQSIHKSLTSLRQGSVILISDDNFESHAYTPFKEAYYTHMSTSPNYQILATLDAGRAQMELEGYGLVEKQVEAAFLIRKELSEDPMISRYFRTLNAEDLIPDSLRQCHNMYMKRKKKCTKEGYSSDSKGSVNGTYSCVSNNQGKGSTTTKEQRSRGLRKARRGGSVTKYEQPIQSSNISSHECVNDTNGCSNHVVRNSLMLGDFTNNNNCTVEGGLNDYGNGDPRGGVKLSRRRSRRDERNGKEGGTSGTMDDSNNGSIIMNSENDNLSYVQDRHNKNYSSSSYSYGMKNFLEYFECSWLSEDEFVLDPTRITLFTGYSGIDGDTFKVKWLMDRYGIQINKTSINSVLFQTNIGTTGSSCLFLRSCLSLISQELDQKKSLFNERDLNQFNDSVYNLVSNYIDLSEFSEFHPLFKKRYSDPRVFNREGDLRMAFYLAYEEDYVEYILMADLKERIRQNELIVSASFIIPYPPGFPVLVPGQLVSQEIVEYLSGLSVKEIHGYDESIGFRCFYNFVLDYFYNLVTSDPYGYYHKIDKGTYDRLKYSNLSKRRSIDSSYHLYICDNETNRMKKTHVCNGSFSIDNHTAISDTYEDVVQVNNLRSDHGRGNHHPVGPYDDGNNGSVPTIPTLPQVAKGVGEVNNEQAMLSASVGSMSKGNFAKARGKETFIAREQTRADRRQTNVYYNHSNDVVKYSQSSSHVSKIKENVLIVQGGKAYASCDAGRSSANYRYRDDPSTSVPKHRKGKKCKGCKSCGGGKGSQAELAKRRGRAECTPHEREDTDDFASEGSKEDDVHAGGRHLSGRASNGRVTKKGRKKNAAKRASARDIAAEASEPKDADEKAEEKLDEKEGDNTNSDDDTTVPDEDGESTSPAKERRRGGKAHHVEGTDSGSYITREKGSRGAKGRKQRGFRNRNRNRSRSSTVQSDATGNTPSQANPMTEVHPVRKATKNDRREEDRYGDELGGGPTPKMRQSNRVMCNQAGKIGLSMQRKSAAGSSKREDNVGGASGRAGGSASRSSGQGSGMTLSENYQSSESLNKRGAHSHLSRKSSSGLSASEKANHSATLCGGKNAKKNDQEGHKVKEMNSPNGSERKDSNHEALLKREIFIDEEDPDKVIADHTGSDNCSKNRATPEVHLPRSSGSISGGDDVNGSARRAGSRVGLPLHANGNDANNGTPNTQGKSEVAFCGNDFHYDEEDLKINSAARENSELEKSCVRKLNSLNNNSYINNLITHVDDDTFIHKEGNFFLECALTNSEINGSSFEMEMSLNNVYSNGGEGGRHPGSYDGGKKSDFE

SEQ ID NO: 137 - protein, 379 aa, Gluconobacter oxydans
MTPKITRFLAEQQPATPCLVVDLDVVGAHYRALHDALPEAKIYYAIKANPAPAILDRLVALGSSFDVASPAEIRMCLDAGATPDRISYGNTLKKAEWIREAHDLGISLFVFDSIEELEKLAKHAPGARVFCRLAVENEGADWPLSRKFGTTLSNARALMLRARDLGLKPYGLSFHVGSQQTGVAAYDHAIAKAAGLYHDLRAQGVDLQMLNLGGGFPTHYRENVPSVQDFADTIHASLRTHFPDGAPEILLEPGRYMVGQSGVVSSEVILVSRRGGAVTDPRWVYLDIGRFGGLAETEGEAIRYTFRTSRDSDEATRSPCVVAGPSCDGVDIMYEKNRIPLPDSLECGDRVEILATGAYVSTYASVGFNGFPPLTEYYI

SEQ ID NO: 138 - protein, 756 aa, Sinorhizobium medicae
MEFYKAFPIAVIDEDYEGKNAAGRGMRSLAEAIEKEGYRVVGGLTYEDARRLVNVFNTESCWLISVDGAESSTTRWEILAELLAAKRSRNNLLPIFLFGDDTTAEMVPAPVLRHANAFMRLFEDSPEFMARAIVRAAQNYLERLPPPMFKALMEYTLHGAYSWHTPGHGGGVAFRKSPVGQLFYAFFGENTLRSDISVSVGSVGSLLDHVGPIGEGERNAARIFGADETLFVVGGTSTANKIVWHGMVTRNDLVLCDRNCHKSILHSLIMTGATPIYLTPSRNGLGIIGPIAKEQFTPEAIAQKIAASPFAGETNGKVRLMVVTNSTYDGLCYNVDGIKAALGDAVEVLHFDEAWFAYANFHEFYDGYHAISSTKPARSQEAITFATQSTHKLLAAFSQASMLHVQHAEAKQLDITRFNEAFMMHTSTSPQYGIIASCDVAAAMMEQPAGRALVQETIDEAMSFRRAVNAVRTQMQDSWWFEVWEPPIADRAPSDAKSDWVLKPGDAWHGFEDLAENHVMVDPIKVTILSPGLNAGGTMLEHGIPAAVVTKFLSSRRIEIEKTGLYSFLVLFSMGITRGKWSTLITELLNFKDLYDANAPLSRALPALAAAHPDVYRTMGLRDLCEKIHDVYRSDDVPNAQREMYTVLPEMALRPADAYNRLVKGCVESIDIDELIGRTLAVMIVPYPPGIPLIMPGERITAATRSIQDYLVYARSFDKKFPGFETDIHGLRFVANPSGRRYLVDCIVEEGQDDTA

SEQ ID NO: 139 - protein, 814 aa, Granulicella mallensis
MSEGRWVLLIASEVGGTDSVSDRAMERLVEAIGKEGYEVVRTSTPEDGLSLVTSDPSHSAILLDWDLEGENQFDERAALKILRAVRRRNKKIPIFLIADRTLVSELPLEVVKQVHEYIHLFGDTPAFIANRVDFAVERYHEQLLPPYFRELKKYTDQGAYSWDAPGHMGGVAYLKHPIGMEFHKFFGENIMRSDLGISTSPLGSWLDHIGPPGESERNAARIFGADWTFFVLGGSSTSNQIVGHGVIAQDDIVLADANCHKSICHSLTITGARPVYFKPTRNGYGMIGLVPIKRFSPENVQALIDKSPFCAGAPVKKATYAVVTNSTYDGLCYDVNRVVEELAKSVPRIHFDEAWYAYAKFHEIYRGRFAMGVPDEIPDRPTIFSVQSTHKMLAAFSMASMVHIKLSQRAPLDYDQFNESFMMHGTTSPFYPLIASLDVAAAMMDEPAGPTLMSETLQDAISFRKAMSSVAHRLRAAEQGWFFRLYQPEYVFDPLDGETYLFEEAADGLLTNRSSCWTLKPGEDWHGYQDEDIADDYCMLDPSKVTILTPGVNAQGVVSDWGIPAAILTEFLDGRRVEIARTGDYTVLVLFSVGTSKGKWGALLENLFEFKRLYDSEAPLEEALPELVLKYPARYRNVTLKELSDEMHMVMQQLNLSGLVNAACDEDFDPVLTPAQTYQKLLRGETEKIKFSEMAGRIAAVMLVPYPPGIPMSMPGERLGGPESPVIRLIMAMEEFGKRFPGFERETHGIEADANGEYWMRAVIETPNGKRNGRNKQRPPSSAPPVKRRKKTIPLPGDDSPLEPGAPVKISPER

SEQ ID NO: 140 - protein, 711 aa, Francisella noatunensis
MKTIVFVYKDTLKSYKEKFLLKIEKDLQSYEYHTLTVDDLSEVVEILEDNSRICCIVLDRTSFSIEAFHNIAHLNTKLPVFVVSDYSQSIKLNLRDFNLNINFLQYDALAGEDSDFIHRTITNYFNDILPPLTYELFKYSKSFNSSFCTPGHQGGYGFQRSAVGALFYDFYGENIFKTDLSISMKELGSLLDHSEAHKDAEEYVAKVFQADRSLIVTNGTSTANKIVGMYSVADGDTILVDRNCHKSVTHLMMMVDVNPIYLKPTRNAYGIIGGIPKEEFQHQTIQEKIDNSSIADKWPEYAVVTNSTYDGILYNTDTIHHELDVKKLHFDSAWIPYAIFHPIYKHKSAMQIEPKPEHIIFETQSTHKLLAAFSQSSMLHIKGDYNDEVLNEAYMMHTSTSPFYPIVASVETAAAMMEGEQGYNLIDKTINLAIDFRRELVKLRSEAGDWFFDVWQPDNISNKEAWLLRNADKWHGFKNIDGDFLSLDPIKITILTPGIKDNDVQDWGVPADIVAKFLDEHDIVVEKSGPYSLLFIFSLGTTKAKSVRLISVLNKFKQMYDENTLVEKMLPTLYAEDPKFYKDMRIQEVSERLHQYMKEANLPNLMYHAFNVLPEQQLNPHRAFQKLLKGKVKKVPLAELYGQTSAVMILPYPPGIPVIFPGEKVTEESKVILDFLLMLEKIGSMLPGFDTDIHGPERAKDGKLYIKVIDD

SEQ ID NO: 141 - protein, 713 aa, Pyramidobacter piscolens
MNVLLLLGRASDSIFDSPEAAELFEELENKGYRLQRPELHGSLVDMLEQRPEAAGAIIDWDTMGGELYASMGELNERLPFFALTSPAAAKELQPPEKDKLTLAFVPLPCRSAERAAAKIDRAVRRYFELLLPPFTRALFKFAAAKKNTFCTTGHLLGSAFRHHAMGWAYYNFYGPNAFRADTSVSVPDMGSLLEHTGAHKDAEELIARAFNADRSYIVTNGTSTANKIVGMYCVSQGDTVLIDRNCHKSMTHLLMMCDVVPIYLLPTRNAYGMIGGIPADEFTSEAIHYKLSQRDDATWPTYAVISDSTYDGLLYDCSWIKANLPVKKIHFDSAWSPYAPFNPIYENKFGMCGEPTAGKTIFETQSAHKMLASFAQASYVHVKGEYDESVLDEVYMMHTTTSANYPIVASAETGAAMMTGNQGRRLLQNSIDRAMTFRRELARLYDESDTWFFKCWQPDDISETKCWPISRGERWHGFLGADEDFNYLDPIRVSVLTPGMDPTGQLMEEGIPAAVVSRYLNNHGVVTEKTGPYHMLFLFALGVDELRTKALLRALQDFKRDYDDDVPIREAMPDLFKLDPVFYMRMSLQQLTRGLHRVMRKRDLPKLMYHAYDDLPEMEYTPYQAFQKNLRGETHEVPLAELLGQVSADMILPYPPGVPLVMPGEKVTEKSAAVLDYLNMLCETGELFPGFDTEIHGAYRRKDGYYVKVLDEE

SEQ ID NO: 142 - protein, 521 aa, Pseudomonas aeruginosa
MDKDNSMSRNNPSRHSILVTSNINAANDANRLSELCRQLEIRGYRLFQAPSRKVALDFLGNAAHPAGILLLVAEPTGENEAAQLAALDELRQVAPSIPLFLLFRQLRIEQLSSQLLDEVQGCFNLAAVPARFIAERIDSDLREWRAPAGPRRLRDYAPPVPRTPVSARYNGRARLDLAPAKQWRIGSESTAEHLATPLNDLSTAYRKTSAGAPAAHAGDIAEAFRRALWEAAARLAREDGDTWFFEILRGNPGPGIEAGRETPAKRWHGLAETLDSSPLLDPLRVALSAPGLDSRGRPASFGVPAAVVCRYLRRHGIAPLRTGDYRFLLLFPQGARAEHAQPLVDRLCEFKRRHDDNAPLKQVLPELLDSSPLYRYIGLRELCAMIHEASLRLHLTALADAAARAAGHAALAPATVYGHLVRDETEAVAIDRLGGRVVASLVGVHPAAAPLLLPGERVADESPALIDYLLALQAFGEHFPGFAPELQGIEIDERGRYRVRCVRPAALARGSGLRLATRRPD

SEQ ID NO: 143 - protein, 488 aa, Caloramator australicus
MYKMDQTQTPIFDALMEYHNRDTVPFHVPGHKRGDGMDNKFKDFVGSNILSIDVTVFKLVDSLHHPTGPIKKAMQLAADAYGSDMAFISIHGTSGAIQAMIMSVVKEGDKIIIPRNVHKSVTAGIILSGAVPVYMQPEIDKNIGIAHGVTPETVERTIKENPDAKAVLIINPTYYGVATDIKRIAEIVHSYDKILIVDEAHGPHLGFNDKLPISSMQAGADICAQSTHKIIGSMTQSSFLQVRAGRVDINRVQQVMNLLQTTSPSYPLMASLDVARMQIATKGKELLDRAIELAEYTREKINQIPGLYCFGKEILGQPGVYALDPTKITVTVRGLGLTGYEVDQILADEYHIQMELSDLYNILAVGSFGDTKEKMDKFINALKDISDRYYGTREVKGEVLDIPAIPKQVLTPRQAFNAKKWSLPLHDSIGKVSGEFLLAYPPGIPIVCPGEIITQEIVDYVQALKDANLYVQGTEDPDVNFIKVVDIE

SEQ ID NO: 144 - protein, 737 aa, Klebsiella pneumoniae
MRCARGIAMMLDLGEYQEESVNIIAIMGPHGVYHKDEPIKELEAALQRQGFQTIWPQNSADLLQFIEHNPRICGVIFDWDEYSVDLCSDINQLNEYLPLYAFINAHSTMDVSSQDLRMTLWFFEYALGLSEEIATRIGQYTREYLENITPPFTRALFNYVQEGKYTFCTPGHMGGSAYQKSPVGCLFYDFFGGNTLKADVSISVTELGSLLDHTGPHLEAEEYIARAFGAEQSYMVTNGTSTSNKIVGMYSAPAGSTLLIDRNCHKSLAHLLMMSDVVPLWLKPTRNALGILGGIPRREFTRDSIQQKVRDTGGAQWPVHAVITNSTYDGLLYNTTWLKETLDVPSIHFDSAWVPYTHFHPIYQGKSGMSGERIPGKVIFETQSTHKMLAALSQASLIHIKGNYDEETFNEAFMMHTSTSPSYPIVASIETAAAMLRGNSGKRLIQRSIERALDFRKEVQRLREESDGWFFDIWQPEAVDKAECWPVAPGEDWHGFKDADADHMYLDPVKVTILTPGMDEQGNMDEEGIPAALVAKFLDERGVVVEKTGPYNLLFLFSIGIDKTRAMGLLRGLTEFKRAYDLNLRVKNMLPDLYAEDPDFYRNMRIQDLAQGIHRLIRQHQLPQLMLSAFDVLPEMKMTPHHAWQRQIKGEVETIELENLVGRISANMILPYPPGVPLLMPGEMITEESRAVLDFLLMLCSIGRHYPGFETDIHGAKRDEDGVYRVRVLKNDERLAR

SEQ ID NO: 145 - protein, 921 aa, Candidatus Accumulibacter sp.
MKADSKSKKSLGEYYSALQLRTDRWSALKIASEQLIQSSSDRKRNEAERKVVELIDALRPIELYWAFPGHDTFGRLGELVTQGRFDVLAITVRNICHSLLSNSYRRNPHHHDVEELTEGSPDDESTEHAVKDLLYFEVLFVDSFSPMQEENLRRKFASLRRAEDPFVYEPVFVPSLTDALIGVMFNHNVQAVVIRNDLKRDSEQTLELLHRHLSRLEKGVLEEVEPKEYGPELCRMIAKLRPELDVYLFTDQSVEEIAGAKLGNCRRVFYNQEDHLDLHLNILRGVAERFEAPFFNALTQYARIPTGVFHAMPISRGKSITASHWIKDMGDFYGMNIFLAETSATSGGLDSLLEPHGPIKKAQEMAARAFGSKQTFFATNGTSTCNKIVVQAIVRPGDIVLVDRDCHKSHHYGMVLAGAQVVYLDSYPLNDFSMYGAVPMKEIKHRLLELKAAGKLDRVRMLLLTNCTFDGVVYNVERVMEECLAIKPDLVFLWDEAWFAFARFGPAYRKRTAMYCAGVLRERYRSAEYREAYAKYQEKMADADDATLLTTRLMPDPEKVSVRAYACQSTHKTLTSLRQGSMIHVHDQDFKDEVEQAFHEAYMTHTSTSPNYQIIASLDIGRRQVELEGFEFVQRQVEQAMSLRKVINTHPLISKYFHVVTVAEMIPAEYRKSGIKSYWDPQHGWSDIMAAWSEDEFVLDATRITLSVAGSGWDGDTFKNEILMNKHGIQINKTSRNTVLFMTNIGTTRSSVAYLIEVLVKIARDLDERLDDASNVERKIFERKVKALREDLPPLPDFSCFHDSFRISSGNGTPEGDIRSAFFLAYDESKCEYIPIEGNSIEKAIASGRQLVSTTFVIPYPPGFPILVPGQVISQEIITFMRALDVKEIHGYRPELGLRIFTEQALAVLEASPSSIQELPT

SEQ ID NO: 146 - protein, 767 aa, Methanoculleus marisnigri
MDYLEEFPVLVIDDELHSDTAEGRASREIVIELKHEDFPVIEALTARDGIHAFLSHPHASCIVIDWELSPETADGTLTAADVITLIRERNPKVPIFLNTEKLAISAIPLSVISRIDGYIWKLEDTPGFIAGHIKRAAANYLADVLPPFFRGMMDYVEEYKYSWHTPGHMGGVAFLKNAAGRIFYNFFGENALRADLSASVPELGSLLEHSGAVGEAERKAAEVFGADRTYFVTGGTSAANKIVWLSTVTSGDVVLVDRNCHKSVMHAIIMTGAVPIYLIPSRNEYGIIGPIMSREFRPEVIAEKVRNCPLIEEPASRTVRMAAITNSTYDGICYSTERIEEHLRDRVPYLHYDEAWFGYARFHPLYAGRFGMHPTDEVGPTVFATQSTHKVLAAFSQGSMLHVRQDRGPVDHPRFNEAFMMLTSTSPQYTIIASLDVAARMMAGHSGRFLVEEAIEEAIVFRKKMVTVAEEIRAGSRAGEDYWWFTVWQPDCIMDEETERPLGEADAALLREHAGCWLLNPHDTWHGFPGIEEGYAMLDPIKVTILTPGIGPGGRMEERGIPAAVVTKYLRKSGIVVEKTGYYSFLVLFTLGITKGKSGTLLAELFQFKALYDRNSPLEEVFPDLVREHPARYSGRGLADLCREMHGYLRDGSIAGTLRNVYATLPEPVMTPAEAYRHLVRGEVAPVPAGEIEGRTVAVMVVPYPPGIPVIMPGERCGAATRAIVDYLVSLQEFDALFPGFESEVHGVDVVVAEDGQRVYYVYCVTE

SEQ ID NO: 147 - protein, 733 aa, Vibrio cholerae
MALVLLTVQCTESAFFRLGDVQMNIFAILNHMGVFFKEEPVRQLHAALEKAGYDVVYPVDDKDLIKMIEMNPRICGVLFDWDKYSLELCERISKVNEKLPVHAFANEQSTLDISLTDLRLNVHFFEYALGMADDIAIKINQATQEYKDAIMPPFTKALFKYVEEGKYTFCTPGHMGGTAFQKSPVGSIFYDFYGPNTFKADVSISMPELGSLLDHSGPHKEAEEYIARTFNADASYIVTNGTSTSNKIVGMFSAPAGSTVLVDRNCHKSLTHLMMMTDVTPIYFRPTRNAYGILGGIPQNEFSREVIAEKVANTPGASAPSYAVITNSTYDGLLYNTQFIKESLDCKHIHFDSAWVPYTNFNRIYEGKCGMSGEAMPGKVFYETQSTHKLLAAFSQASMIHVKGEFDRESFNEAFMMHTSTSPQYGIVASTETAAAMMRGNTGRKLMQDSIDRAIRFRKEIKRLKGESEGWFFDVWQPENIETTECWKLDPNQDWHGFKNLDDNHMYLDPIKITLLTPGMSKDGELEQSGIPASLVSKYLDEHGIVVEKTGPYNLLFLFSIGIDKSKAMQLLRGLTEFKRGYDLNLTIRTMLPSLYREDPVFYEGMRIQELAQGIHDLTRKYQLPELMYKAFDVLPEMKVTPHVAWQQELRGQTEEILLNEMVGRVSANMILPYPPGVPLVLPGEMVTDSSRPVLDFLEMLCEIGAHYPGFETDIHGLYRQKDGSYTVKVLKD

SEQ ID NO: 148 - protein, 428 aa, Saccharomyces cerevisiae
MTAAKPNPYAAKPGDYLSNVNNFQLIDSTLREGEQFANAFFDTEKKIEIARALDDFGVDYIELTSPVASEQSRKDCEAICKLGLKAKILTHIRCHMDDAKVAVETGVDGVDVVIGTSKFLRQYSHGKDMNYIAKSAVEVIEFVKSKGIEIRFSSEDSFRSDLVDLLNIYKTVDKIGVNRVGIADTVGCANPRQVYELIRTLKSVVSCDIECHFHNDTGCAIANAYTALEGGARLIDVSVLGIGERNGITPLGGLMARMIVAAPDYVKSKYKLHKIRDIENLVADAVEVNIPFNNPITGFCAFTHKAGIHAKAILANPSTYEILDPHDFGMKRYIHFANRLTGWNAIKARVDQLNLNLTDDQIKEVTAKIKKLGDVRSLNIDDVDSIIKNFHAEVSTPQVLSAKKNKKNDSDVPELATIPAAKRTKPSA

SEQ ID NO: 149 - protein, 487 aa, Kibdelosporangium sp.
MEHTRAPVLEALRSYRDGEHLSFLPPGHKQGRGADPRTLDVLGKDVFASDVILMNGLDDRAMRQGVLADAEKLMADAVRADTAFFSTCGSSLSVKTCIITVAAPRQPLLVSRNAHKSVIAGVIISGIQPVWVHPRWDERLDLAHPPDTDAVAAAFRRAPDAKGMLLITPTDYGTCASISDIAKVCHQYDRPLIVDEAWGAHLPFHPDLPSWAMDADADLCVTSVHKMGAGLEQGSVYHLQGDRVDPRLLKARADLLDTTSPSALMYAALDGWRRQMVEHGHGLLDQALGHAHTLRQRLGGLDGIRVTGRADLVGPGRANDADPLKVIVDLTDLGVSGYVANEWLRDHHHVDVGLSDHRRFAAQITVADDESTVHRLVTAVRDLVKHAGQLPRTPPVDLPEPGELELEQAVRPRDAFFGEAEHVDVDKAVGRIAAETISPYPPGVPAVVPGEVITQPVLDYLRSGLRAGMYIPDAGDPDLATIRVAAT

SEQ ID NO: 150 - DNA, 2550 bp, Entamoeba invadens
atgcacccttttccgattaagatccttatcactacatccttggatgaagaaaagccgctcccacagtctttgcaactgatcagggacgaagttatcagactcggagcaacgccgattatcactcacaacctccatgacgcttacgaggagctgaaaaggactattgaaatctctgctatcttcttcgattgggattcagagtaccaaaagtgcaaagacaaacttagaaagtttctctttccgtttacttcgcaaatcttcgaccataaggttctcgtgttgccggctacggagaaagacccgtttttgcaagctaaaaccccgctcatgcatttggaagaggaaggatacaccctgattgtgcctcgaagctacccggacgccaaaatttcggaattgcagaaggtcgagactcacgaagagctgctgaaagttatggaaaaagatcagctcaaggtggtgccgtcgccgcttaccgccatcaggaccttcaagtccatcaaccgtaagatcctcatcttcctgtacaccgaaagactcttcatcgaacgcctccctattcaagtgctggagtcaatcgaagcctacttttggaaaggagaagagactcccactttcgttgctaagcgtatggtgacacaggcatctgaatatattgaggatattctgcctccttttttcaaagccttggtcaagtacctgaaccaaggcaaatattcgtggcattcaccgggccacatgggtggcgttgcttatcttcgatcgccaccgggaaaattcttttacgacttctacggcgaaaacatgctctgctcagaccttagctgtagcgtgtgcgaacttggctcgcttctgaatcacactggtccgattggcgaggcagaaaaatatgcgtccaaggtgtttggtagcgagttcacatacttcgtgctgaacggtacgtccacagcgaataagatggtgttccagggtacagttccatctggaaaggtggttgtgctggacaggaatgcgcacaaatcatcgatgcaagctattatgacgggcaactacaagcctgtgtacctgagccctgtccgaaataagtacggaatcatcggtcccattccctttagcgagttcagcgttaaaaatgtgacccagaaggcatccaaaatgaatttcttcaacaaaggcgatattgatgacggagtccaacttttcgttctcactcagtgcacttacgacggaatctgctataatgtgaataaagtgctgcaatcgcttacccagttggacgcaaaaaatgctatgttcgacgaggcctggtttccctacgcccactttcaccctttttatgcttcctttcactcgatgaacaaagactttttcgacaagttcgacgagaatgacgaaagcttgttccacggctcctcggcgcttcaagatacagatgaagacgaggaagtgagacgctccatgactccgaactcatttaaaggtacaatctatgcgacgcaatccacacataaggtcttggctgctttgtcccagtgctcaatggtgcacgtgcgaaacagcacagacccattcaaatttgataagttcaatacttactttcaagcaaacacgactacttctcctcagtattcgttgatcgcatccttggacatgtcgtctgctatcatggatatcagcggtgagtccattctcgatgatgtccttaaagaagtgatctccttcagatgcgcaatggcgcgcgtgaagagcgagtttaaagagtctggcgaaggatggttttttaatgtgtggcagcccagcgatattttgtctggtaaaaaaaacatttacgagaccaactattggatccttcctcccagcggccccgacgcttggcatggctttcctaacattggtaaaaaccaatacctgctggacccgttgaaagtgaacatccttacagtggacgaagaccttgatattgagatccccgcgtgcgtggtgtgccgcttcctggcaatgaacggtatcattatggagaaaatgggttactataccatgctgagcctcttcactgtcggatctcgccgcggtaagtctgcgactttgatcactgcgttgacacagtttaagaaactgtacgacacaaatactcctctcaagtatgtgtttacacaggaaaagtcgctcgactcggaaaacgtgggtctcaaagacttttgtaatatgatgaaccccgaaatcaagaaaatgcaagaaatggaaaacgccacattttcaggcaatctgcccgaagttgcctgttccccgttcgttgcatcgaatgcattgatctcggatgaagtggagtgggtgaaggtcgagaatttgacgggacgcgtttcggcgcttctctgcgtcaattacccccctggcatccccaccatcatgcccggagaaatcttcgaccagcttcacacagacatgatgattgctctggcgcattttgaggaacgatggcctggttacgaattcgaagttcatggtctggtgaagaaaaacaataatttctttattccttgtctgaaggaa

SEQ ID NO: 151 - DNA, 1446 bp, Tepidanaerobacter syntrophicus
atggaaaagcaggaaattaacaaattttcaaagacaccgttaatccaagccttgaaggaatacgaaaagaaagattctcttcgattccacatgccgggtcacaaggggaggtgccctaagggcgtcttttgtgatattaaggaaaacttattcggctgggacgtaacggagattccgggattggatgactttgcgcaaccagaaggcccgattaaagaagcacaggagaaattgagcgccctctatggagcagatacatcttactttttagtcaatggcgcaacgtccggaattatcagtatgatggctggcgcactgagcgaaaaagataagattctgatcccgcgtacatcacataaaagcgtattatctggcctcatcctgacgggagcgtcagcagcgtatattatgcctgaacggtgcgaagaactgggagtttacgcccaggtggaaccatgtgcaatcaccaacaaactgattgagaaccctgatattaaagctatcctcgtcacaaatccagtatatcagggtttttgcccggacatcgctcgtgttgccgaaattgcaaaagagcggggcacaacgctgcttgcggatgaagctcaaggtccgcattttggcttttcaaagaaagttccgcaatctgcgggcaaatttgcagacgcgtgggtgcagagcccgcataaaatgctgacatcactgacgcaatcagcttggctgcacatcaagggaaacagaattgataaagaaagactggaagactttctgcacatcgtgaccacatcatcaccgtcctatattcttatggcatcactggatggtacgagagaactgatcgaagagaatggcaattcatacattgaaaaggccgttgaactggcccaaaaggcacgctacgaaattaataactctacagtgttttacgcaccgggccaggaaatccttggcaaatatggaatttcttcccaagatcctcttcatctgatggtcaatgttagctgcgccggttatacagggtacgatattgaaaaagcactgagagaggacttttcaatctatgcggaatacgctgatctgtgtaacgtctattttcttatcacattttcaaacacactggaagacattaaaggattattggccgtcctctcacacttcaagcctctgaaaaacaaagtaaagccatgcttctggattaaggatttgcctaaagtcgcactggaaccgaagaaagcgtttaaactgccagcaaaatcagttccgtttaaagactcagcgggctcagtttcaaaaagaccgctggttccgtatccgcctggtgctccgttagttatgccgggagaaatcatcgaaaaggagcatatcgaaatgatcaacgagatcctgaactccggcggatactgtcaaggagtgaccagtgaaaaattcattcaggttgtgactgatttc

SEQ ID NO: 152 - DNA, 1437 bp, Microcystis aeruginosa
atgccgtcacccgagtcggcaccacttgtgtctcagctccagaagaaggtgaactccttggatgttccattctacgcccctggtcacaagcagggtgaaggaatcggcgaggatttgtcaaacttgctgggcaagtccgtgttcaaggccgacctgccggaacttcccgatttggataacttgttcgcaccaaccggtgtgatcaaggaagcccagattctggcagccgaaaccttcggcgctgataaatcctggtttttggtgaacggctcctcctgcggcatcattgctgcgatcctggcgacctgtggcgagggcgataagatcattttggctcgtaacatccacaaatccgcgatctctggtctgattctttccggcgcacgtccaatcttcattaacccggagtataatcccactatcgatttgaacttgaatattaccccacagtccttggaaaacgccctgaagttgcacccggatgcaaaagccgttatggtggtgtcccccacctaccagggtgtgtgctgtgatttggaaaccatcgcacaaattactaaccactattccatcccattgttggtggatgaagcacacggcgcacacttcgcatttcatcctgatctgccacctgcagccttgtccttgggagccgacatggctatccagtctacccacaaggtcctgggcgcgcttacccaagcatccatgctgcacttgaagtccgatcgtatctcctccgagaaagtggaccgtgcattgcagttggtccaaaccacctctccaagctacttgctgcttgcatccttggattcagctcgcaagcagatggcgatgcaaggcttggatttgttgaccaaaaccttggatttggctgcgaccgcgagaaaggaacttaacaaaatccctaatatctccgtgttggatttcccacactcaatccctggctgccattggtttgatcgtacccgattgaccgtgatcgtgaaggacttcggcctgaccggttacgaaatcgatgacattttgcgtgagaaatatgcggtcaccgcagaattgcctactttgtcgcagctgaccttcatcatttccatcggtaaccaccgcgagcatatcaacagattgatcaccgctttccaatgcctgaagtctccatcttccacctctttgccaccaaccccagcgcctgtgaccggcaactccaccatctccccacgtaaggccttctttgctcctaccgaaattgtgtcccgtaagaacgcacttgatcgactctctgccgacgtcatctgtccatacccacctggcattccggttctgatgcccggtgaacttatctcccaggaagtgttggattatctgcaaaccatcttggatttgggcggcaccattaccggcggctccgatgacaacttcgaaacctttcgtgttttgaag

SEQ ID NO: 153 - DNA, 1479 bp, Bacillus anthracis
atgtaccgtttgtcacagtatgaaaccccattgttcaccgccctggtggagcattcgaagcgaaacccgatccagtttcatattcccggccacaagaagggccaaggcatggacccagagttccgtgagtttattggtcacaacgcacttgccatcgatttgatcaacattgctccattggatgacctgcaccatcctaagggaatgatcaaagaagctcaggatttggcagccgctgcgttcggtgctgaccacaccttcttctccattcaaggcacctctggtgcgatcatgactatggtcatgagcgtgtgcggcccaggcgataagatcctggtcccccgtaacgttcacaagtccgtgatgtccgcaatcatcttctccggcgccaagccaatctttatgcatccagaaattgatcctaaattgggcatctcccacggcatcaccattcagtccgtgaagaaggcattggaagaacactccgatgccaagggcttgctggtcatcaaccctacctacttcggttttgcagccgacttggagcagattgtccaactggcacattcctacgacatcccagtgttggtggatgaagcccacggcgttcacatccatttccacgatgagctgcctatgtctgcaatgcaagctggtgcggacatggctgcgacctctgtgcataagttgggcggctccttgacccagtcctctatccttaacgtgaaggaaggcttggttaatgtgaaacacgtccaatctatcattagcatgctgaccactacctctacctcttacatccttctcgcatccttggatgtggcccgtaagcgactggctaccgaaggcaaagcgcttatcgagcagaccattcaactcgctgaacaggtccgcaacgcaatcaacgacattgaacacctttactgcccaggcaaggagatgctgggcaccgatgctaccttcaactatgaccccaccaagatcattgtctccgttaaagatttgggaatcaccggccaccaggcggaagtttggctgcgagagcaatacaacattgaagtggagctttctgatttgtataatatcttgtgtctggtgactttcggcgacaccgaatctgaaaccaacaccttgattgcagccttgcaggatctgagcgcaatctttaagaacaaggccgacaagggtgtccgcattcaagttgaaatcccggagattcccgttcttgctctctccccacgtgatgcgttctactccgaaaccgaagtgatcccttttgaaaacgctgcgggccgtatcattgcagacttcgtgatggtctacccacctggtatcccgatcttcaccccaggcgagatcattacccaggataacctggaatatatccgtaagaacttggaagccggcttgccagtccagggtccagaagacatgactcttcaaaccctccgtgtgatcaaggagtacaaaccaatctcc

SEQ ID NO: 154 - DNA, 1383 bp, Salmonella enterica
atgaatgcgaaagtcattaacatgacaagaacaacgccggtaatcaataaaatgcaagccatgcatgatcgcaacatttttagctttcatgcacttcctgtctcaagctatggcgaatcagatgttgtgggagacgccagaaatgaaattctggcatacccggaatcttccgcgacaggtgaactttttgataactttttctttccttccggcgttatttgcgaatcacaaaaactgacagctggaatctacggttccgattcatcattttacatcacgggcggaacatctacggctaatcagatttcaatcagcgccttatatgataaaggcgacagaattttggtggatcgcaactgtcatcaaagcgttcattttcatgtgcagtctatcggcgcggaaacacattatttatgcccggatttgcgtacggaagacggagaaatttgtgcttggtcttacaaccatttagaacaaacactgcttaacttgcagcggagcggaaaagcatgcgatattgtcatcctgacggcccagtcttatgaaggtattatctacgacattcctggcgttcttacaagattattgtcagcgggagtgtgtacgagaagatttttcatcgatgaagcatggggctcaatgaactactttagcgaagacacacaatctttaacggccatgaacattgaaccgctgcttgataaataccctgatttggacgtcgtatgcacacattcagcacataaaagcctgttttgccttcgtcaggcatcaattatccattgtcggggcacagcgacgttaagcgaacgtattgaaacggctaaatatcgcattcatacaacgtcaccgaattaccctattatcgcgtctttggatgcttcccaagccatgatggcatcacatggcaaaaaactggcgaaccatgctcgtatgcttgttcggaaatttgttgccggagtgtcttccctgaaatattttggagaaaaagcaatttgccagggtatcttttcaagccattggcatatctactacgatccgacaaaagtcatgctggacgtatcttcccttggtaacggcaaagatattaaaaaactgttgtgtaacgaaaacatctacgttaaaagatttatcaacaacgtgctgctttttaactttcatatcggcatcaacgaacaagcagtttcatcactgttgcaggcgcttaattctatttcccaagaaatctacaaacaggatcgcagcaaagcagaagtatcttccaaatttatcatcccgtacccgcctggcgtcccgttagtatttcctggagaaatcatcgatgacgaaatcagaaacaaaatccatgaatatcgcaaaaacggatttctgattatcgcagcg

SEQ ID NO: 155 - DNA, 1095 bp, Yersinia enterocolitica
atgagtggagagcgcatggttggcaaagtgttttatgaaactcagagcacacataaactgcttgcagcattttcacaagcatcaatgattcacatcaaaggcgattattcagaatcaacgtttaatgaagcctacatgatgcatacaacgacctcaccgaactacggaattgttgcaagcatggaaacagctgccgcaatgatgcgtggcaatcctggaagacgcatgattctgcgtagcatcgaacgggcgatgcattttagaaaagaagttagaagactgcgctctgaatccgataactggtttttcgacgtatggcagccggaggatattgacgaaatcgcgtgctggccacttcagccgggacaagcatggcatggattttctcacgcggatgctgaccacatgtatcttgatccgattaaagttacgatccttacaccgggcatgtcccacgaaggcgcactggaagaagaaggcattccggcggctctcgtggcaaaatttctggatgagcggggtatcgttgtggagaaaacaggcccgtataatctgctgtttctgttttcaatcggaatcgataagactaaggcgatgtccctcctgcgtggtttgacagattttaaacgggctttcgacttgaatctgagaattaaaaatatgctgccagatcttttcgcagaagatccggacttctatcgacacatgcgcattcaagacctggccgcaggcattcataatatgatcagacaacacgatctgccgagattgatgcgcaaatcttttgacgtccttccggaaatgaaactgacgccttataatatgttccaacagcaagttagaggcaacattgtggcgtgcgatatggctgaccttgtaggaaaagtcgtagcgaacatgattttaccgtacccgcctggcgtccctttggtaatgccgggagagatgatcacagccgaatcacgtgcagtgttggattttcttttaatgctctgtgccattggcgcacggtatcctggatttgagacggatattcatggcgctaaacgagacgaacacgggaggtactgggttaacattttagataccaaacaa

SEQ ID NO: 156 - DNA, 1419 bp, Bacillus cereus
atgaaccagaatcgtatcccactgtacgaagcccttattgagttcaaggagcgtcgtccattgtccttccacgttcctggtcataaaaacggcttgaatttcccaaaggaagtggtcgaagagtttaaagacatcctgtctattgacgtgaccgagttgagcggcctggatgaccttcactcacctttcgaatgcatcgatgaggctcagcaattgctggcggacgtgtacggtgtcaacaagtcgtacttcttgatcaacggctccaccgtgggtaacttggctatgattttgagctgctgtggcgaacacgatattgtgctggtccagcgtaactgtcataagtccatcatcaacggcttgaagttggctggcgcgaacccgatcttcttggacccttggattgacgaagcctacaacgttccagtgggcatccacgacgagatcattaaggaagctattgagaaatatccaaacgcaaaggccttgatcctgacccatcctaattactatggaatgggcatggatcttgaagcctccatcgcttacgcgcacactcataagattccggtcctggttgacgaagcacacggcgcacacttctgcctgggcggtgcgtttcctcagtccgcacttgcatacggcgcagacatcgttgtgcactctgcgcataagaccctgccggcaatgactatgggctcctaccttcacatcaactcccgtttggtgaaggaagagaaggtgtccacctacttgtcgatgttgcagtcctcctccccaagctatcctatcatggcatccttggacatcgcccgcttcaccatcgctcgtatcaaggaaaaaggccacgacgaaatcgtcgagttcttgcaggagttcaaggaagaattgtccaccattccacaaatcgcgattctgcagtaccctcttcaagatggcttgaagatcaccgtgcagactcgatgtcaattgtcgggatacgaactgcagtccgtcttcgagaaagttggcatctacaccgaaatggcagacccgtataacgtcttgtttattcttcccctccaggttaacaagaagtacatgaaggccatcgagatgattcgtgttgctctgcaatactatgaagtgaaggataaaatggagtctatccgatacacctataaaggcgagttctccccattgccctacacctataagcaattggaagagtacgaaaccaaagtcgttccagtggaagaggcagttggtatggtggcagccgaaatggtcatcccgtacccacctggcatccccttgattatgtatggtgaacgtatcacctctgaacacaaggagcagattatgtacctggagaaagctggtgcgcgcttccaaggctccaccaagtacatgaaagtgtatgacatcgaatcccgtttt

SEQ ID NO: 157 - DNA, 1545 bp, Cryptosporangium aurantiacum
atgacagctgtagccttgccttcaggagatagaccagttctctatgacgcagcgcatggcagcgctccgttagttgatgccattatcagatatagaggatgcgaaacgggtgccttgcatgttccgggccatgcaggcggcagaacagttggaccgggccttagaaatctgcttggctcaacatttctggctagtgatgtctggcttacacctgcagacgcgacaacggccagacgcgaagctgaagcactggctgccaaagcgtggggatctgatgaagcactgtttctgctggatggctcatcaggcggcaatcgcgcagttcatctggcgcaacagcaaaatccgggcgccgatcatgttgtggtcgcacgtgactctcacacatcaacacttgcgggactcgtactgagcggtgctacaccgcattgggttacaccgagactggatcagggcggatttggcatttcactgggcattgacccgatctcattagatagagcgcttacagacttagcagcgacgggccatagagcatcactggtttcaatggtttcaccgggctatgctggtgcgtgttcagatgtacgtgcattagctgccgttgcgcatcggcacgatgctccgttgtttgtggacgaagcatggggcgcacatctgcctttccacccagatttgccggagaacgcaatttccgctggcgccgacgtagctgttacaagtgcccataaaatgctggcagctccatctggtgctgcacttatcctggttagaggcgaaaggattgatgcggggagaatcggccgcaccgtacagatgactcaaaccacttcaccgctgctgccagttcttgcctctattgatgaagcacgtcggacaatggtgagcagaggacgcatccttttagatcggacactggatctggttgcagatgcgagaagaagactggcagcgattccgggcgttagagtcgctgaagccgaggatcttggcgttccgagagaacggtttgacccgctgcgtcttgtagtttcagtacggggcttaggattgacaggcctcgcactggaaaaactgttaagaacaccgggaccgggccttggcacgtctggactgcttcatcctgcagtagcggttgaaggcagcgatgagtctaatctgttcgttgcgatcacaacgtgcacgtctccggatgtggttgatgcactggtgacagcgttgagaacactctcctgtcgccctcgccgtcggctgagaccagcatgggatggacagcttgtggctgccttattggcaccgagagaacaagtctgcacaccgagagaagcgcattttgcagcgacggaaaacattccgctggaacgagcggtgggcaggacctctgctgaaccgatcactccttatccgccgggcgttccggctgtcatgccgggtgaacgtttagatcgggacgccgtggctgcactggaaagagcagtttcaacagggatgcatattcatggcgcagcagatccgacattagctacggtgtccgtcctgagagat

SEQ ID NO: 158 - DNA, 1422 bp, Garciella nitratireducens
atgtctctgatcgaaggccttaacaaaatcttgcaagaaaacctgacaagacttcacatgccgggacataaaggtcgcaaaatctttcctgaaatcttgaaaaacaacctgcaagaaattgatattacggaaattccgggctcagacaatctgcatcatgcgcaggaaattctgcttgaagctcaacagagagcagcgaaagtctttggagcccaaaaaacatattttcttatcaacggaacaacagtaggtatccaggcgatgattttagctacgtgcagaccgggcgataaactgttggttcctcgtaactgtcatcggtccgtgttttcagcactgatccttggtgatattatcccggtttatctgagcccgatttctcatcctaaaacaggcatcgacctttccatttcagtggaagaaatcgagaaaaaactgaaacaacatccggatgttaaaggagcggtgttgacataccctacgtattacggtagctgctctgacattgaaaaaatcgctaaaatccttcatcataagaaaaaatttctgcttgtggatgaagcacatggagcgcatttagctttgcataaaaatctgccgctttcagccttacaggctggtgccgatattgttgtggactccacacataaaattctgtcatcatttacgcaatctgcaatgttgcatattggcaaccagtacctgtcaacagaaaaagttgaattatttttgggaatgctgcaatcttcctcaccgagctacttattgatggcgtcccttgattgggcctcacaacaggcagaagaaatgggccagatcaaatgggaaaaaatcatccaatggacacatcaggctagagaagacatccgccatcatacgaatatgaaaccgattggcaacgaaattatcggacgttatcatgtcgtagattacgaccctagcaaactgcttattgatgtcagctctacaggcttgacgggaatcgaaacagaaaaaatcctgcgtgaaaaataccgcattcaagtagaactttctgattactaccatatcttggccatgacgggtatgggcacgatcgaacaagacattcagagatttacacaggcaatgatcgatattgaccataaatacggcaatccgcataaaaaactgacgtcattgcctattagaatccgcgaaggtgaaatgggccttagcccgcgtaaagccatctacgcaccttctgaaaaaatcttgttgaaaaacgcgcagggacggatgagcaaagaatttattatcccgtacccgcctggtatcccgatggtcttacctggcgaagtaatcacacaagaaatcatcgaagaaattgaaatcatgcagcgctggggcggaacaattatcggacttgaagataatacgttacaaaacatccaggttattaaa

SEQ ID NO: 159 - DNA, 1527 bp, Actinoplanes sp.
atgaccggtcgtcttgaatctttcggcaccctcgctcgatggtacatgtgcggcatgaaggatcgcatcctggaccacgcctgtgctcctttgctggaagcattggtggattaccaccgtgaggaccgatatggcttcaccccaccaggccatagacagggacgtggcgcagatccacgtgcacgtcagatcctgggcgcttccacctaccaagcggacgtccttgcgtctgcaggcttggatgaccgttcctcctcccaccagtatttggccgaagctgagaaactgatggcggatgcagttggcgcagaccaatccttcttttctaccgccggctcctccttgtccgtgaaggcagccatgttggccgttgctggcggtcgtggccagcttctcatcggtcgagatgcacacaaatctgtggtcgccggcttgatcttctccggcgtggaaccacgctgggttgatgtgagatacgacgagaacttgcacttggcacacccaccatccccacagcaactggaagaggcatggaatcgtcacccaaccgctgcgggcgccttgatcgtctcccctaccccatacggcacctgcgccgatattgctggtttggcggaagtttgtcatcgtcgaggcaagccacttattgtggacgaggcatggggtgcccacttgcctttccatgatgacttgccgacctgggctctgggtgctggagcagacatctgcgttgtgtccgttcacaagatgggcgcgggttttgaacagggctccgtgcttcactcccgtggcgatttggtggatgccaaacacttgagcgcctgtgctgatttgctgatgaccacctctccaaacgcaatcgtctacgccggcttggatggctggcgtcgtcagatggttgaacacggccatgatttgttgtcagcagccattcgtgttgcagaatccgtgcgtgatcgtatcggaagaattgctggtctgcacgtggtgcgtgaagaattgatctccgtggaagcatcccatgatttggacccactgcaggtggtcatcgatcttaccgatttgggtatttccggctaccaggctgcggattggctgcgtgagaactgccgaatcgatatgggcttgtcggaccaccgtcgaattttggcaaccctgtctatggcagatgacgaaaccactgctgaccgtctgatcgaagcattgcgtcgtttggtggcagcagcaccagccttgccagctgcaaaacccgtccacttgccaccaccagccgctttcgaagttgatccagtaatgttgccgcgtgacgctttctttggccctgctgaaaccgtcccggttgctcaggcaactggtcgtgtgtgcgcagagcaaatcaccccttacccaccaggcatcccagctttgctgccaggtgaacgtatcaacgcggagattttggattatctgcgatctggcttggcggcaggcatggttcttcccgatagcgctgacccaaacttggataccatccgtgtggcgattact

SEQ ID NO: 160 - DNA, 2145 bp, Escherichia coli
atgaatgttattgctatcttgaaccacatgggcgtttattttaaagaagaaccgatcagagaactgcatcgcgccttagaacgtttgaactttcaaatcgtctaccctaacgatcgtgatgacctgcttaaattgatcgaaaataacgctcggctgtgcggagtaatctttgattgggacaaatacaatttagaattgtgtgaagaaatctcaaaaatgaacgaaaacctgccgctttatgcgtttgctaacacgtacagcacattggatgtgtctctgaacgacttacgtttgcaaatttcatttttcgaatacgctctgggcgcagcggaagatattgccaacaaaatcaaacagacaacggacgaatatattaatacgatcctgccgcctcttacaaaagcactttttaaatatgtccgggaaggcaaatacacgttttgcacaccgggacacatgggcggcacagcgtttcaaaaatccccggttggctcactgttttatgatttctttggccctaacacaatgaaaagcgacatttcaatcagcgtgtctgaattaggttccttattggatcattcaggcccgcataaagaagccgaacagtatatcgcacgggtctttaatgcggatagatcctacatggtaacaaatggaacgtcaacagctaacaaaattgttggaatgtatagcgccccggcaggttctacgatcttgatcgatcgtaactgtcataaatcactgacacatttgatgatgatgtctgacgtgacgccgatttattttcgtcctacacggaatgcctacggcattctgggtggcatcccgcaaagcgaatttcagcatgcgacaatcgctaaaagagttaaagaaacgccgaacgctacatggcctgttcatgccgtgattacaaattcaacgtatgatggactgctttacaacacggactttattaagaaaacactggatgttaaatccatccattttgactcagcatgggtgccgtatacaaattttagccctatctacgaaggcaaatgcggaatgtcaggcggcagagttgaaggcaaagtgatttatgaaacgcaatctacacataaactgttggctgcctttagccaggcgtctatgatccatgtcaaaggcgatgtaaacgaagaaacatttaacgaagcatatatgatgcatacaacgacatccccgcattacggaattgtcgcctcaacggaaacagcagcggctatgatgaagggtaatgcaggcaaaagacttattaacggctctatcgaacgggcgatcaaatttagaaaagaaatcaaaagattgcgcacagaatcagatggatggtttttcgacgtttggcaaccggatcatattgacacgacagaatgttggcctttacgctccgattcaacatggcatggatttaaaaacatcgataacgaacacatgtatctggacccgattaaagtcacgctgcttacacctggaatggaaaaagatggtacgatgagcgactttggcatcccggcctctatcgtagcaaaatatttggatgaacatggcattgttgtggaaaaaacaggaccttacaatctgctgtttctgttttcaatcggaatcgataaaacgaaagcacttagcctgcttcgcgcgttaacagattttaaacgtgcgtttgacctgaatcttcgggtcaaaaacatgctgccgagcctttacagagaagatcctgaattttacgaaaatatgcgcattcaagaacttgcacagaacatccataaactgatcgtacatcataatttaccggatttgatgtacagagcgtttgaagttcttccgacgatggtgatgacaccttacgccgcatttcagaaagaacttcatggaatgacagaagaagtctatttagatgaaatggttggtagaatcaacgctaacatgattttgccgtacccgcctggtgtcccgctggtaatgcctggcgaaatgattacagaagaatctcgcccggtgctggaatttcttcaaatgttatgcgaaatcggcgcccattatcctggatttgaaacggatattcatggagcgtatcgccaggctgacggtcgttacacagtcaaagtattgaaagaagaaagcaaaaaa

SEQ ID NO: 161 - DNA, 2265 bp, Polynucleobacter necessarius
atgaaatttagatttccgatcatcatcatcgatgaagactttcgttcagaaaatatttcaggaagcggtatccgggatcttgctgaagccattgaaaacgaaggcgtcgaagtaatcggattgacatcttatggtgatctgacgtcctttgcacaacaggcgtcacgtgctagcacatttattgtctcaatcgatgacgaagaatttgattctgactccgaagatcatgacttaccggcgttgaataacctgcgggcttttattacggaagttcgtaaacggaatgaagatattccgatctttttatatggcgaaacacgtacatcaagacacatgcctaacgatattcttagagaattacatggatttatccacatgaacgaagatacaccggaatttgttgccagacatattatccgcgaagcaaaagtgtacttggatagcctggcaccgccgtttttccgcgcccttacgaactatgcatctgaaggttcatacagctggcattgtccgggccattcaggcggagttgcatttttaaaaagccctgtgggaagaatgtttcatcaatttttcggtgaaaacatgctgcgcgcggatgtctgtaacgctgtagaagaacttggccaactgcttgatcatacaggaccggttttacagagcgaacgtaatgcagcgcggatttttaacgcggatcatcttttctttgtgacaaatggcacatctacgtccaacaaaatcgtctggcattctacggtagctccgggagatgttgttctggttgatcgtaactgccataaatcagtaatccatagcatcacaatgatgggcgcgattccgatctttcttatgcctacgcggaatcatttaggtattatcggaccgattcctaaagaagaatttgaatggaaaaacattaaaaagaaaattgatgttaacccgtttatcaaagacaaaaacgtcgtacctagagtgatgacactgacgcaatcaacgtatgatggtatcgtttacaacgtggaaatgatcaaagaaatgttggatggaaaagttgacagcctgcattttgatgaagcgtggcttccgcatgctgcctttcatcctttttataaagatatgcatgccattggctcagacagaaaacgcacgaaaaaatcactgatgtttgcaacacaaagcacgcataaactgttggccggattatctcaagcatcccaggttttggtgcaggatgccgaagacgcaaaactggatcgcgactgctttaacgaagcatatttgatgcatacatcaacgagcccgcagtacgcgattatcgcttcttgtgatgtctccgcagcgatgatggaatctcctggtggcacaacgcttgtagaagaatcaattgcagaagcgatggattttagacgcgcgatgagagaagtcgatgacaaatttggcgctgattggtggtttaaagtatggggaccggaccatcttgccgaagaaggcattggagaacgctctgattgggtgttagaaccgtccgccccttggcatgactttggcaaactggcaaaagattttaacatgcttgacccgatcaaagcaacagttgtgacaccgggcctggatattgaaggaaactttggttctatgggcatttctgcgtccatcgtgacaaaatatttggctgaacatggtgtcattgtagaaaaatgcggcctgtactcatttttcatcatgtttacaatcggaatcacgaaaggtagatggaatacattggtcacggaactgcaacagtttaaagatcattttgacaaaaacgccccgctttggaaagttttacctgaatttgtggcaaaacatccgagatatgaacgcgtgggcttaaaagatatttgtcaacagatccatgaattttacaaaagcagagatgtcgcacgcatgacaacggaaatgtacacatctgacatgattccggcgatgatgccttccgaagcatgggccaaaatggctcataaacaagtcgatcgtgtaccgcttgaccgtttagaaggacgggtcacagcgatgctggtaacgccttatccgccgggcattccgctgcttatccctggtgaaagatttaacaaacgcatcatcgattacttgtactttgctcgggactttaacgaaaaatttccgggctttgaaacagatattcatggactggttaaaacgtcagtggacggcaaaagcgaatattacgttgattgtgtgcgtcaggaacgggacattacactt

SEQ ID NO: 162 - DNA, 1422 bp, Sediminibacillus halophilus
atgaaccaggatcttaccccattgttcggcgcactgcaaaccttctcccagaagaacccgatttccttccacgtgccaggccataagaacggcaaaatcttcaccgataatggtttggaaatctttgagaagttgctgcagattgacgttaccgaattgactggtctggatgaccttcacgtggctaccggagcgatcaagcaagcccagaacttggcagcctcgtggttcggcgctgatgaaaccttcttcttggttggcggttccaccactggcaacttggccatgatgttgaccgctgcgcgcctgggtagaaaggtccttgttcagcgtaactgccacaaatccatcctgaatggtttggaactgtctggagctgagccagtgttcgtggctcctgcgtacgaccgtcgagtgggccgctataccgcaccaaccttggataccatcagacaagccattgaccagtacccagaaatcggagctattgtgttgacttaccctgattatttcggcaccgtctttgacctgccgtccgtggtcgaacttgcgcaccaacgtaacatcgcagtgttggtggatgaggcacacggcgtccatttctccttgtctgaagtttttcctgcaagcgcattggaattgggtgctgacttggttgtgcagtcagcgcacaagatggctccggcgctcactatggcatcttacttgcacattaaaagccatatcattgatcgtggcgacgtggctcattacttgcagatgttgcagtcctcctccccgtcatatcccctgatggcatccttggatttggcccgatactatcttgctggtatcaaggaaaacgagctgaatcccatccttgaatccattgcgcgccttcgtgaagtgttctcctccgcagaaggctgggaagtgttgccgaacgaagcgggcaaggatgatccattgaaaatcaccttggaagtggataagcgttggtcaggcattcaagtggcaaaactgtttgaagaacaggacatctaccccgaactttccaccgagaaccaagtgttgttcatccacggcttggcgccatttcaagaatgggagcgtctgcagactgcagtcgaaaagacctctcagcgtctgaaattccttccgaaccgagacaccatcggctccgtgcaaattgaacagcaacagatccactccttggaagtgtcctaccagaccatgaaccgtatgcgaaaggagttcatcggctgggcatctgccgagggtaaaattgcagcccaggccgtcatcccatacccaccaggcatcccagttcttctcaagggcgaaaagatcacctctgtgcacatcaagatgattaactacctgatcaaacaaggcatcaacttccagaaccataatatcgagcagggaatgtattgtttgcgt

SEQ ID NO: 163 - DNA, 1407 bp, Carboxydocella sporoproducens
atggcccaactgagagcgtatggcaaaatcaaaatcatgaacaaacaggcagattgcccgatttttgacgcgatcaacgaataccttgctcaaaaaggcgattgttggcacatgccgggacatggccaaggtcgtgcctttcagtctctgtggcctgaacttgcagcggttgcacggtgggatgtgacggaaattccgggtttagactcctggcatcagcctgaaggctgcatcgctgccgcagaaaaactgcttgcggaagcatatcaaacacaagcatcatttttcctggttgaaggagccagcgcaggtatttgggctatgatggcggctgttgtgtcacaaaatggtaacagaattgctattcctagatgggcgcatgctagcgtctttcatgccttagtattgacgggcgcagaaccggtgttttatccgccggtgtttctgccggaatggcagcttattatcggccctgaaacagaaggagttgctctggattctgacggaattttctttctgtatccgtcctacgaaggtgtggcctggcctttgaaagattggatgttggcaaattcatacaacacaacggctccggttttagtggacgaagcacatggcgcactgtttccgtggcatgaaagaatgcctgtctctgcaatcacgtccggctgtgatggagtcgtacatggtttacataaaacaggcccggcgttgacgcaaacaggctatctgcatcttcctacagcgaaactgaaagctgattgggttagaaaaaaccttagcttattgacaacgacatcaccgagctatctttttatggccgcattagacttggctagacgcgaattatactttcatggacgcgaaaaaattgaacaaatgctggaatgggccgaacagttacgttgggaattggaacggattggcatcgaagtgctgaaaccggaacaacttcctgcgggctatcaattagatcgtacgcggctgcttttacgtttggaaggttacacgggcgtcgaagtagcaacacatcttagacaaaaaggaatcgttgtggaaaaatatgaagcggatcgcgtcttgctgcttattaattacgactttaacccggaacaaggcaaacgcttaatcgaagctctgggacagcttaaaccgaaaacaggtaaacctaattgctggaaagaacagttttatccggaagaaaacagattagtcatgttgcctcgcgaagcgtggcttgcaaagaaagaacgtgtagccacgaaccaagcaaaagatcgggttgctgctcaaacagtagcaccttgcccgcctggccttgcaattgtttgtcctggagaagtgattcaggcggacacaatcgccgcactggaagcatggggcattgaagaaatctgggtcgtaaaa

SEQ ID NO: 164 - DNA, 1491 bp, Clostridium sp.
atgaatcttaaacgtcaagaacatacaccgctgctggatgcaattaagaaatatgttgaatctgagccggttccgtttgatgtaccgggtcacaaaatgggctcactgaagacggaactgagcgattatgctggcgaaatgttataccggttggacatcaatgcccctattggcctggataatctgtatcatccaaacggagtgatcaaagaagcggaggacctttttgctgaagcatttggtgctgatgaagccatttttagcgtcaacggcacaacgggcggaatcatgacgatgattgtaggaatcatcgacgcaaaggataagatcatcttaccgcgtaatgttcataaatctgtgatcaacgcgctcattctgtcaggcggcattccgatctttgtcgctcctgatgtagaccaggatacaggcattgccaatggagttcctacggagaactatgtgaaagcaatggacgaaaatccggatacaaaagcgatctttgtcattaaccctacatacttcggtatcacgtcagatctgaaagcaatttgcgaagaagcacataaaagaggcattatcgttattgtggacgaagcacatggcgcacatctgcactttaatgattcaatgccgctgagcgctatggaagcaggagcggatatttcaagccttagtgtgcataaaacaggcggctcactgactcaatcttccgtcatcttggttaagaaagatcgtgtcaactttagccgtattcagcgggtatttgccatgttttcatcaacatcacctagccatctgttgctcgcatcactggatgtcgccagaaagaaactggtattcgaaggcaaagaactgctggataaggaactggaactggctaagtacgcaagagagaaaattaataacattcgcggctattcttgcatcgacaaatcctactgtgatagaccgggcaggtttgacttcgatcttaccaaagttgtgattaatgttagtgaagtgggcttatcgggatttgatgtctataaaactatccgaaaggaaagcaacattcaactggaactgggtgaagtttcagaagtactggcaattatcagccttggcacaactaaagaacatgttgacaaactgatcgcagcgctcaaacgcatttctgatgaatattacgactccaccgatgttcataaagtgcctcactttaagtatgagtacccagaattagttgttagaccgagagaagcatttcatgcgccatctaaaatcgttgctttggaagatgccgtgggcgaaatttcagcggaatcactgatggtgtatccgcctggtattcctatcgcaattccgggcgaaattatcacaaaagacgcgctggatcttgttgaattttacgaaaaatcaggcggcgttttattgtctgactccccggatggatacatcaaagtcattgaccaggagaagtggtatctgcgcagcgaaattaattacgatttc

SEQ ID NO: 165 - DNA, 2340 bp, Burkholderia multivorans
atgaccgcatccttgactcagccagcattccgtcgtttgggcatgaaggcattgctggtgcaacacgacatcgatgcacgtaccgctactgcacgagcagcaaccgcactcgctgatgagttgcgtgcacgactggttgaccttgtgattgctacctctgcggatgacgcgcgtgcagtggtcgatgcagacccagccatccagtgccttctcttgaactgggaacttggcgatgacccacagcacacccctgcccaagctgttctggatgctatgcgtgcacgtaatgcaaccgtcccagttttcctgcttgcatcccgcgcgagcgcatcagccattcctgtggatgccatgcgtaaggctgatgacttcatctggttgttggaagacaccactgcctttatcggcggtcgtattgttgctgcgatcgagcgttaccgagaaaccgtgttgccaccaatgttccgcgctttggcgcagttctcccgtgtgtacgaatattcgtggcacaccccaggccataccggcggcaccgctttcttgaaatcccccgttggccgagcgtacttcgagttctttggtgaatccctgtttcgctctgatctttccatctccgtgggcgagctgggttctctgcttgatcactccggcccaatcggcgacagcgaacgctacgcagcacgtgtgttcggcgcacaccgtacctatcatgttactaacggctcctctatgtccaatcgagtgatcttgatggcttctgttacccgtaaccaggtggcgctgtgcgatcgaaattgtcacaagagcgccgagcatgctatcaccatgtcaggcgccattccgacctacttgatcccctcccgtaaccactatggtatcattggcccaattatgccagaacgtctgaccgctgcggcagtccgacttgctatcgatgcaaacgccttggtgcgtggccgtgatggtattgacgcgacccctgtccacgcacttatcaccaactctacctacgatggcttgtgctataatgtcgcgcgcgttgaagcattgttgggccagtccgtggatagattgcacttcgacgaagcctggtacggctatgctcgttttaacccgatctaccgtgatcgacacgccatgcatggcgatccagcccaacatgacgcttcgaagcctaccgtcttcgcaacccagtccacccacaaactgcttgccgctctgtcacaggcatccttcatccacgttcgtgacggccgaaacccgatcgagcatgcgcgtttcaacgaagcatacatgatgcacgcatctacctctcccaactatgcgatcattgcaagcaatgatgtgtcagctgcaatgatggatggcccaggcggcgaagcattgaccactgatgcgatccgtgaagctgtcgcgttccgccagatgctcggccgtttgcacgccgaatgtgctgagaacgatgactggttctttaatggctggcaacctgataccgttgtggaccgcaagaccggccgtcgtatgagattccacgaagctgatgaaaccctcttggcgaccgatccatcctgctgggtcttgcaccctggcgatgcttggcatggtttcggcgacatcgaagatgactactgtatgttggacccaatcaaggtgtccatcgtcaccccaggcattgcaccacacggcggcttgatgccagtgggcatcccagcatccgtcgttaccgcctatctggatcgtcacggcattgtggtcgaaaagaccactgacttcaccatcttgttcttgttctccctgggtgtgaccaagggcaagtggggcacccttgtcaacactctgcttgattttaagcgtgattacgacgcaaatgtgtctttggagcaggcactgccggatcttgtcgcccgttaccccgaccgttaccgtaaactgggccttcgtgatttgtgcgacttgatgttcgccgctatgtccgacttgaagaccactgaaatgatgtcccgtggcttctccaccctgccaaaacctgatttctcacccgcagaagcctttgagcacctggttcataacgacattgaaatgttggaattgtctgaaatggctggacgtaccgttgctaccggcgtggtgccatacccgcccggcatcccgctcttgatgcccggtgaaaacgcaggcccagcagatggccctctgcttggttacctgaaagctcttgaacagtatgatttgcgtttccctggttttacccacgacacccacggcgtggatgtcgaagacggagtgtaccgtatcgcatgtattaagctgccgaaacgtgatggtggcaacacccga

SEQ ID NO: 166 - DNA, 1452 bp, Selenomonas sp.
atgccgtacttgtcccagaccaacgcccccatcgaagaggctctggtgcgtatgaaacgtgcacgacttgtcccgttcgatgttcccggtcacaagcgtggccgtggcaacccagaactggcagcctttcttggcgctgcgtgcctggatgtggacgtcaactccatgaaaatgctcgacaacttgtgtcaccctgtttctgtgatccgagatgcggaacacttggcagctgaggcgttccgcgctgctcacgcattctttatggtgtccggcaccactggctccgtgcaagcaatgatcttgtccaccgtgggtcgtggcgataagatcattatgccacgcaacgtccacagatcagcaatcaacgctctcattttgtgcggtgcggtgccgatctacgtcaacccaggcatcgaagataccctcggtattgcattgggaatgcgcactgatgacgtcgcagccgctatggagcgtcatccagacgccaaagctgtcttcgttaacaatcctacctactatggcatctgctccgatttgcgtgccattaccgaaaaagcgcacgcacgtggcatgaaggtgttggtggatgaggctcacggcacccacttgtacttttcggatcgtttgccgactgcggcaatggatgccggtgctgacatggccgcaatctccatgcataagtccggcggctccttgacccagtcctctattttgctgtgcgccgatactatgccccttggctacgtgcaccagatcattaacatcacccaaaccacctctgcctcatacttgttgttggcatccttggacatctcccgtcgtaacttggcattgcgtggccgtgaagtgatcgatcgcatcattggcttggtggcatacgcacgtgatgaaatcaacgcgattggcgattactatgcatacggccgtgagttgatcgatggtgacgcggtttatgatttcgacaccactaagttgtccatctttacctgcgccactggcttggctggcattgaagtgtacgacatcctgcgtgatgactatgacatccagaccgagttcggcgacatcgcgaacctgcttgcatacgtttctgtgggcgatcgtccgaaagacatcgaacgactggtggcggcacttgccgagattcgtcgtaattaccgtaaggacccatctaaaaccctgaagatggaatatatcgacccagtggtcgtttgcggtcctcaggatgcgttctacgcagaaaaagaatccttgccgatccaagaaaccaagggccgtatttgcgccgagtttgtcatgtgttacccaccaggcatcccaattcttgctcctggcgaagagatcaccgacgagattctcacttacatccgatatgcaaagaaaaagggctgtcagatcaccggtcctgaagatatgtccattcaacgcctgaacgttatgaccgagaga

SEQ ID NO: 167 - DNA, 1095 bp, Yersinia enterocolitica
atgtctggtgaacgcatggttggcaaagtgttttatgaaacgcagtccacacataaactgcttgcagcgttttcacaagccagcatgattcatatcaaaggcgattattcagaaagcacgtttaatgaagcctacatgatgcatacaacgacatctccgaactacggaattgttgcatcaatggaaacagctgccgcaatgatgagaggcaatcctggaagacgcatgattctgagaagcatcgaacgcgcgatgcattttagaaaagaagtccgtcggcttcgctctgaatccgataactggtttttcgacgtatggcagccggaagatattgacgaaatcgcgtgctggccgcttcagcctggacaagcatggcatggtttttcacatgcggatgctgaccacatgtatcttgatccgattaaagttacgatccttacacctggcatgagccatgaaggcgcactggaagaagaaggcattccggcggctttagtggcaaaatttttggatgaacgtggaatcgttgtggaaaaaacaggtccttacaatttattgtttttattttcaattggaatcgataaaacgaaagcgatgagcctgcttcgtggtttgacagattttaaacgggcttttgacctgaatcttagaatcaaaaacatgttgccggatttgtttgcagaagatcctgacttttatagacacatgcgcatccaggacctggccgcaggcattcataatatgatccggcaacatgatctgccgcgtcttatgcggaaatcttttgacgtcctgccggaaatgaaacttacgccttacaacatgtttcaacagcaagttagaggcaacattgtggcgtgcgatatggctgaccttgtaggaaaagtcgtagcgaacatgattttaccgtacccgcctggcgtcccgttggtaatgcctggagaaatgatcacagccgaatcacgcgcagttctggattttctgttgatgttgtgtgccattggtgcacgttatccgggctttgaaacggatattcatggcgctaaacgtgacgaacatggccggtactgggttaacattttagatacaaaacaa

SEQ ID NO: 168 - DNA, 2304 bp, Yersinia pseudotuberculosis
atgatcgatctttcctctcacaagaaacgtaacgtgttggtggtcgattccaatatccgagacattaacaccgcaaatggtcgcgccgttaacgaattgatcattgcactgaatgacatcaacttcaatgtgattgcagccgctacctttgaggatggcgcggcaaccgtgatctccgattcctccttgtgctgtatttttgtcgattggacctctggcggcaacgatgacgaaagccactcacaggccttcgctttgctgcaagacatccgtcgtcgtaacaagtccgtgccagtccttctcatggctgagcactcctgcattaactcgttgtccctggaaaccatgcagttggttaatgagtttgtgtggatgcatgaagatacctctgagttcatcgccgcacgtgcaaaggcattgatcattaaatactaccagcaattgctgccacctttcacccaggccctgtttcagtacactcaagacaacccggaatattcttgggctgcacccggccaccagggcggcgtggcattctccaaaaccgccgtcggtcgtgaatttcttgatttctttggagagaacttgttccgtaccgacactggtatcgagcgtgagtccctgggctccttgttggatcactctggcccaattaaggaaagcgaggcatacgccgctcaggttttcggcgcacacgcttcttatagcatgttgaacggcacctcttcttccaatcgtgcaatcatggcggcagttgtgggcgataaacagattgccctgtgcgaccgaaactgtcacaagtcaatcgaacaaggtcttgttctctcgggcgcattgccagtgttctttatccccaccagaaaccgttacggaatcattggcccaattcctaaggcccagttccaaccaaccgcgatcgcacagaagattgaacaaaacccattgaagtccttggcttgcgattctaagcctgtgtacgcggtcatcaccaactgcacctacgatggcatgtgttataatgctcagcaagcgcaggacttgctggctaagtccgtcgatcaaatccacttcgacgaagcgtggtacgcctatgctcgtttcaacccattgtaccgagagcgctttgcaatgcgtggcgatccagctgatcacgacgcgttgggtccaaccatctttgctacccagtccacccataagttgctcgccgctttgagccaggcatcctacatccacgtcagaaacggcaagaaaccgattgaacactcccgtttcaacgagtcatacatgttgcagtccaccacctctccattgtatgccatcattgcggcaaacgaagttggtgccgctatgatggaaggcggccagggcttggctctgacccaagaagtcatcgatgaggcggttgactttagacttgcgctcgcacgtgcccacgatgctttcgcgaaacagggtgaatggttctttaagccgtggaacaccccagagatcactgactccaagtccggcaagaaactgccgttttctcaggcatcccgtgaacaactgaccaccgatccagcctgctgggtgcttaaaccaggcgacccttggcatggtttcgagcagcttgaagaggattggtgtatgttggacccaatcaaggctggcattatggttcccggcatgggcgatgatggcaagttgtccgaaaaaggcatcccagcggcaattgtgaccgcgttcctgggtcagcgaggaatcgtcccttcccgcaccactgatttcatggttttgtgcctgttttctgttggcgtgaccaagggcaaatggggcaccttgatcaacgtgttgttggagttcaagcagcactacgattcgaataccccaatttccgtctgcttgcctgacctggcaaagaactacccacaccaatatgcccataagggccttaaagtgctctgtgatgagatgttcgcatacatgaagatctctgaaatggacaaactgcaggcagaagcattctcccacttgccgaccccagtcgttctgcctcgacaggcattccaagatcacatggccggtcgctgtgaacttctcccgatcgataagttggctggacgtgtcaccgctgtcggtgttattccctacccgcccggcatcccaattgttatgccaggcgaatccttcggctcccacgaagaaccttggcttcgttatatcctctccattaccaaatggggacagcatttccctggctttgagaaaatcttggaaggctccgagcagaagaacggccaatacttcatttgggtcctgaagcaa

SEQ ID NO: 169 - DNA, 1428 bp, Carnobacterium inhibens
atggatagaaagaaagtggacagcgaacaacatagaagaccgctgtttgatggcctgaatcagcacaaaaagaaagaaaaagtctcatttcatgttccgggccacaaaaatgggatgaactgggatgaaacatggtcatcatttcaatcggcactgtcatttgaccagaccgaagttactggtctggattatcttcatgacccggaaggcattctgaaagaatcccaagaactgcttagtaagttctacggctcaaagaaatcatactacctgattaatggctcaacagtgggaaaccttgctatgatcatgggtgccactaacaaaggcgatcaagttttcgtggaccgcggatgccatcagtctgttattcacgcactggaactggcggaactgcaaccggtgtttttgacacctgattgggcagaaatggaccaggcaccgctgggtgtcaacattaaaaatctgaaagaagcctttgagcattatccggctgtcaaagcccttatcgtaacatatccgacgtacgatgggatggtatatcctattgaagaactgatcgaatacgcaagagaacggaaatgtctggtccttgtagatgaagcacatggtccgcatctgacattgggcgatccgtttccgtcttccgcactggatctgggcgctgacgccgttgtgcaatccgcacataaaatgttaccttcattgacacaaacggcgtatctgcacattggaaatcaatcatcagatgctctgaaaaacaaaatcgaacattatttgcacatctttcagtcaagctctcctagctacccacttatggtttctttagaatacgctagatactttcttgccgatttcacaaagaaagacttgatcgcgacgctcaaatatcgcgatctgtggaagaaacagtttaagaaagctggcctgacaattttccagagcgatgacccgctcaaggttaaagtttcactgattaatcaatcaggcgaagaactggcgggacaactggaagaacaaggcgtctttggagagaaaacagatggcacatcagtattattgacgttcccgctcctgaagaaagaaacaaagatcacggaactgttttcaatccatatcacgcagagtgttaaaaacgaagttccgaagaaaatgaagacaccgctgttaattgctccgtttgtcgaacttgatctgagctatgaacgtcaaacatcatcaacaaacaaacagatctctcttgcagaagcggagggcaaaattgcagcgcgaaacatcacaccttatccgccgggcattccgttggttctcaagggagaaagaattaaagtggagcaaattaaacagatcaatcattacttagatcaaaacatgcgggttacgggattggaaaaccagaaagaagttgttttcttttcagaaaacgac

SEQ ID NO: 170 - DNA, 1416 bp, Bacillus cytotoxicus
atgaaccaaaatcagatcccactctacgaagcgttggttcgtttcaagcagcaacagccgttgtccctgcacgtgcccggtcataagaacggcttgaatttcccaaaagaagcaatcgattccttcaaggacatcttgtccattgatgtcaccgagttgactggcctggatgaccttcactcaccttcggaatgcatcgatgaggcacaacgtttgctggccgacgtctacgaagttcagaagtcctatttcctggtgaacggctctaccgtcggtaacttggcaatggtgctttcctgctgtggtgaagaagacatcgttttggtgcaacgaaactgtcacaaatccatcatcaacgctcttaagttggctggcgcgaacccagtgttcttggacccttggatcgacgaagtctaccacgtcccagttggtgtgcataacgaaaccatcaagaaggcaattgaccagtatccgaacgcaaaagccttgatcctgacccaccccaactactatggaatgggcgtgaacttgaaggaatctatcgcttacgcgcaccaacatcagattccagtcctggttgatgaagcacacggcgcacacttctgcttgggagagccgtttccccaatccgcagtcgcctacggcgctgacatcgtggtccagtccgcacacaaaaccctgcctgccatgactatgggctcctacttgcacatcaacagcgatttgatcaacggagaaaaggtgttccgttacttgaacatgttgcagtcctcctccccgtcatatcccatcatggcatccttggacatcgcgagatttgctctggcgaacatgaaggagaaaggctaccactctatcattgagttcatcaaccagttcaaggaagcattgcacagcattccgcagatcaagattctccaataccccttgcaggatgaactgaaggtgaccgtccaatcccgttgtcagttgtcaggatacgaactgcaatcccttttcgagcaggctggcatctacgctgagatggcggacccatataacgtcctgtttatgcttcctctccaggttaacgaaaagtacatgaagggcatcgaaaccatgcgctcccttctctctcactataagatcaccgataaacgtccgagcattcgatacacttataagggcggcatctccccattgcctttcacctacaaacacttggaagagtatgaaaccaagcgtgtgccaattgaagaggccgtgggtatgatcgcagccgagatggtcatcccatacccacctggcatccctcttattatgtatggtgaaaccatccgtctggaacacattcgagagatggctcacttggaacgcactggcgcacgtttccagggcaacccagcatacatcaaggtttacgtgatcgaacgaaag

SEQ ID NO: 171 - DNA, 2130 bp, Candidatus Sodalis pierantonius
atgaatattatcgcgatcctgcttccagaacatgtattttataaggctgaaccggttagagaactggcacaggcgcttactgaccaaggttatcatattgtgtacccgtctggctcacaggatctgttgacgctgctggaacaaaaccctagaatcgcaggcattatctttgactgggaacagtatggaatggatctgtgccttgccattaatgaaatcaacgagtatctgccgttgtacgcgtttatttctacacattccgtgctggacgtctctgcgaatgatatgcgtatggctctttatttctttgaatacggcttaaacgcagcggctgacattagccagcgtatccggcaatatacggcagaatacattgatgcgatcatgccgcctttaaccaaagcattgtttcattacgttgaagaaggcaaatacacgttctgtacaccgggccacatggcaggaacggcgtatcagaaatctccagtgggctcactgttttatgatttctttggcggaaacacactcaaggcggatgtatcaatttcagttacggaactgggatcacttttagatcatacatcatcacatctggaagctgaagagtatatcgcccgcacttttggtgcagaacaaagctacatggtgacaaatggcacatcaacaagcaacaaaattgtcggcatgtatgctagtccggccggctcaacagtacttatcgatcgaaattgccataaatcactggcccatctgctcctgatgagcgatgttgttccgatctatctgacaccgtctcggaacgcctatggcattctaggcggcattccgcagcgtcaattttcaagagcatgtattgcgcagaaagtcgccgcaacaccgcaagcatcatggccagtacatgcagttatcacaaattcaacgtatgatggacttctctacaacacgcagtacatcaagcaaaccctggcggtgccgtcaatccattttgatagcgcttgggtcccgtataccaatttccaccctatctatagaggcaaatcagacatgtcgggagaacgcacaccggataaagttatctttgagacgcaatcaacacataaactgctcgcggcattttcacaagctagcattatccacattaaaggcgattatgacgaacttacgtttaatgaagcatatatgatgcatacaacgacctcaccgcattatggaattgtagcatccatcgaaatggccgcagcgatggttagaggcaaacctggaagacgcttgattcagcgatcaatcgaaagagcactgcattttcgtaaagaagtttatcggctgcttcaggaaagcgagggctggtttttcgacatttggcaaccggaaattatcgaggatgccgtgtgctggccagtcgaaccgggtgcaccttggcatggctttagagatgctgacgccgatcacatgtatttggacccgattaaagtcactatcctgacacctggcatggatgaaacgggagagatggcttctgaaggaatcccggcatcactggtagccaaatttctgaatgaacgtggtgtcgtagttgagaaaacaggcccgtataatctgctgtttctgttttcaatcggtatcgataagacgaaggcgatgagcctcctgcgaggattaaccgagtttaaaagggcctatgatctaaatctgagagttagaaacatgttgcctgatctgtatgcggaagatccggatttctacagacacatgcgcattcaggatctggctcaaggcattcatggccttatccggcaacagcatctgccgcagcttatgttaaatacttttgcggtgcttccagaaatgaaaatgacaccgtatgctgccttccaacagcaagttcgtggcaatgtggaaacggtcgaactgagtcaaatggtgggaagaatttcagcgaacatgcttttaccatattcaccgggcgttccggtggtcatgccgggtgaaatgatcacagagggctcaagagcagttctggattttctgctcatgctgtgttccattggtcaacattatccgggcttcgaaactgatattcatggcgccgaactgacagatgacggaagatactgggtacgcgttctgaaa

SEQ ID NO: 172 - DNA, 1413 bp, Clostridium sp.
atgagcaataaaacaccgctgcttgatgaagtgcttaaatacaagaaagaagaaaacttgatttttagcatgcctggtaacaaatgtggcaaagtttttctgaaagataacatcggcaaagaatttgtggacacaatgggctatctggatattacagaagttgatccgctggataacttacatgctcctgaaggcattatccttgaagctcaacagttattggccaaaacgtatggcgttaagaaagcatattttatggtaaacggctcaacgggcggaaacctttgtagcatttttgcagcgtttaacgaaggtgatgaagttttagtggaaagaaactgccataaaagcatctacaacggccttatcttgcgcaaattgaaagtgaaatacatcgaaccgctgatcgatgaaaaacttggaatttttctgccgccggacaagaaaaatatctacgatgctatcgaacaatgcgaaaacttgaaaggaattatcctgacatatccgtcatactttggtattacgtatgacatcgaagaagtcctgcttgatctgaaaaaacgcggcctgaaaattgttgtggacagcgctcatggagcccattttatcgctaataacaaactgccgaaagccatttatggaatccctgattacgtcgtactgtctgcacataaaacattgccggcgctgacgcagggttcttatttattgtccaacacagatgacaacgcggtagaattttacctgaacacgtttatgacaacgtctccttcctatttgattatgtcaagcctggattacgcacgttattaccttgacgaatatggctacgatgaatacgaacgtttgatcaacaaagcggaaaaataccggtcaatcatcaacagcttgaacaaagttcatatcatctctaaagaagatcttgctgaagattacgacattgataaatcccggtacatcgtcacagtatctaaagaatattccggccataaactgcttgaatacttaagagaacaacgcattcagtgtgaaatgtcatttgccagcggagttgtgttattgctgtctccgatcaatgatgacgatgactttaaaaaacttttaaaatcatttgaaaatttgcaactgaaagacattagacaggataactactcaaaatactacagctttatcccgaagaaagttctggaaccttatgaagtttttaagaaagaatgcaaatacatcaaaatcaatgaagcagataaaaacattgcatgtgaagcgattatcccgtatccgcctggaatcccgttgctgtgccctggtgaagtaattacgaaagaagcgatcgatattatcgatgactacatctctaacaaccgctccgttattggaatcaaaaataaagaatatattaaagtcgtaatcgaa

SEQ ID NO: 173 - DNA, 1371 bp, Pseudomonas sp.
atgacccagcgtcaagtcatcaacgcgtccgtttctccaaagggctccttggaaaccctgagccagcgcgaggtgcagcaattgtccgaagcaggctccggctccacctacaacatctttcgtcaatgcgcacttgccattctcaacaccggcgcccacgtcgataatgctaagactatcttggaggcctataaagatttcgaaatccgtatccaccagcaagaccgtggtgtccgactggaattgctgaacgctccagcggatgcatttgttgacggcgagatgatcgcatccacccgtgaaatgttgttctccgctctgcgcgatattgtgtacaccgaaaacgagcttgattcccagcgtatcgatttgtctacctctcaaggtatttctgactatgtgttccacttgttgcgcaacgcaagaaccttgcgtccgggcgtcgagcccaagatcgtggtctgttggggcggtcactccatcaacaccgaagagtacaaatataccaagaaggtgggacacgaacttggcttgcgttccctggatgtgtgtaccggttgtggcccaggcgtgatgaagggtcccatgaaaggagctactatcgcccacgctaagcagcgtatccacggcggccgttacttgggtctgaccgagccaggcatcattgcagccgaagccccaaaccctatcgtgaatgagttggtcatcctgcctgacattgaaaagcgtttggaagcattcgtccgtgttggccacggcatcattatcttcccaggcggcgcaggcaccgcagaagagttcttgtacttgctgggcatcctgatgcaccccggcaacgaaggtcttccgtttcccgtcatcctcaccggcccaaagcatgctgcgccttaccttgagcagctcgatgccttcgttggcgctaccttgggtgaagcagccaagaaacactaccaaatcatcatcgatgacccggccgaggttgctagacagatgaccgcgggtctgaaggcagtgaaacaattccgtcgagaacgcaacgacgcgttccactttaattggcttctcaagatcgatgagggcttccagcgtccatttgaccctacccacgaaaacatggcgaacttgaagttgtcccgtgatttgccagcacatgagcttgctgcgaacttgcgtcgtgcattctccggaatcgttgcaggcaatgtgaaggacaaaggcatccgtctgattgaacagcacggtccgtaccaaatccgtggcgatgcagccattatgcagcccttggaccaattgctgaaggcgttcgttgcacagcatcgaatgaaactgccaggcggtgctgcgtacgtgccttgctatcgcgttgtggct

SEQ ID NO: 174 - DNA, 2262 bp, Castellaniella defragrans
atgaaatttcgcttcccgatcgtaatcatcgatgaagactacagatcagagaatgcgagcggctttggcattagagcactggcagcggctatcgaagccgagggtgtagaagttcttggggtgacaagctatggcgatctgtcatcatttgctcaacagcaatcaagagcatccgcgtttattctttcaatcgatgacgaagaatttgatgaagacagccctgaggatgtggctaatgccattaaaaacttgcgcgcctttatcggagaactgcgctttagaaacgaggatattcctatctatctttacggcgaaaccagaactagccagcatattccgaacgacatcctcagagaactgcatggctttattcacatgttcgaagatacaccggaatttgtcgctcgccatattatcagagaagcacgcgcgtatcttgacagtctgccgccgccgtttttccgtgaactgctggaatatgcttcggatggctcatactcttggcattgccctggccactcaggcggcgttgcatttctgaaatcaccagttggacagatgttccatcaatttttcggtgaaaatatgttgagagcggatgtgtgtaacgctgttgatgaattagggcaattattggatcatacaggcccggtagctgaatctgagagaaatgccgcacgcatttttcatgccgatcactgctttttcgttacgaatggcacatcaacatcgaacaaaatcgtgtggcatgcaaatgtcgcggctggcgatgttgtggtcgtagacagaaactgtcataagtctattcttcacgcgatcaccatgactggcgctattccggtttttctgcgtcctacacggaatcatcttggcattatcggacctatcccgctggaagaatttgatcctgaatccattagacgcaaaatcgaggccaatccatttgcaagagaagccgcaaacaaaagaccgagaattttaacattgacgcaatcaacgtatgatggcgttatctataacgttgaaatgatcaaggagaaactgggcagcgagatcgatacgttgcattttgacgaagcgtggctcccgcatgcggcttttcacgaattttatgaggacatgcacgcaattggaccgaaccgacctaggtctaaagatacaatgatctacgcgacacattccacgcacaaactgctggccggccttagtcaagcatcacaaattgttgtgcaggattgcgaatcacgtcaacttgaccggaatatctttaacgaagcatttctgatgcatacatcaacaagcccgcaatatgcgattatcgctagctgtgatgtagccgcagcgatgatggaaccgccgggcggcacagctttggttgaagagtcaattcgtgaagccctggactttcgtcgggcaatgcggaaagtggaaagcgaatttggcaaaaatgattggtggttcaaagtgtggggaccgaatcggctggtcccggaaggtattgggaaccgagaggattgggtccttggctcaggagacgaatggcatggttttggcgatctggctgaaggctttaatatgcttgatccgattaaagccaccgtcgtaacaccgggcctggatatttctggtacatttgcggattccggcatcccggctgccttagtatctcgttatttggttgaacatggagttgtggtcgagaaaacaggtctctactcatttttcatcctgtttacaatcggtatcactaaagggcggtggaatacacttttaacggctctgcagcagtttaaagatgactatgatcgcaaccagcctctgtggcgtgtgcttccagaattttctcgcgcccataaacattacgaacgaatgggattgagggatctgtgccagaaaattcatgaagcatatcggcactacgattttgcgagacttacaacgcgcgtgtatctgagcgacatggttccggcaatgagaccggctgatgcctacgcacgtatggcgcatcgggaagtcgagagagttccggtcgatagactggaaggcagagtaacaggagttttgctcacgccgtatccgccgggcattccgctgcttattccgggcgaacgctttaatagggatattgttgactatctgaaattcacacaggagtttaatcagcaatttccgggattcgaaaccgacgtgcatggtctggcgtatgaaactgatgagcaaggcagaagacattattacgtcgattgtatccgtgaaggtgcg

SEQ ID NO: 175 - DNA, 1422 bp, Garciella nitratireducens
atgtccttgattgaaggcctgaacaaaatccttcaggagaacttgacccgtctgcacatgccaggtcataaaggacgaaagattttccctgaaatcttgaagaacaacttgcaggaaatcgatattaccgagatcccaggctccgacaacttgcaccatgcccaagaaatcttgctggaggctcagcaacgtgcagccaaagtcttcggtgcgcagaagacctactttttgatcaacggcaccactgttggcatccaggccatgatcctggctacctgccgaccgggcgataagttgttggtgccacgcaattgtcaccgttccgtgttctccgcattgatcctgggcgacatcattcctgtgtacttgtcaccaatctcccaccccaagaccggtattgacctgtccatctccgtggaagagatcgaaaagaaacttaaacagcacccggatgtcaagggtgccgttctgacctatcccacttactatggctcctgctccgacatcgaaaagatcgctaagatcctgcaccataagaaaaagtttttgttggtggatgaggcacacggcgcacacttggcattgcacaaaaacttgccgctgtccgcgttgcaggctggtgctgatattgtggtggattcgacccacaagatcttgtcctccttcacccagtccgcaatgctccatatcggcaaccaatacttgtctaccgaaaaggtggaattgttcttgggcatgttgcagtcctcctccccctcctacttgttgatggcctccctggattgggcgtctcagcaagcagaagagatgggccaaatcaaatgggaaaagatcattcagtggacccaccaagctcgtgaggacattcgacaccatactaacatgaaaccaatcggcaatgaaatcattggtcgttaccacgttgtggattatgaccctagcaagttgctgatcgatgtttcctctaccggcttgactggtattgaaaccgagaaaatcttgcgcgaaaagtaccgtatccaggtggagctgtcagattactatcacatccttgcgatgaccggaatgggcaccattgaacaggacatccaacgtttcacccaagcaatgatcgatattgaccacaagtacggcaacccacacaagaagttgacctctttgcccatccgtattcgagaaggagagatgggcttgtccccacgtaaagcgatctacgcaccttcagaaaagatccttttgaagaacgcccagggtagaatgtctaaggagtttatcattccatacccaccaggcatcccaatggtgctgcctggcgaagtcatcacccaggagatcattgaagagatcgaaattatgcaacgttggggcggcaccatcattggcctggaggataacactcttcagaatattcaagtgatcaag

SEQ ID NO: 176 - DNA, 1419 bp, Lysinibacillus odysseyi
atgaaatccgagcgtccgttggttgaggcattgcagaaattcgtcgagaaagagccgtattcccttcacgtcccaggccacaaaaacggccgtctgtctacccttccaaaggaaattaaaaaggctttgatctacgatgtgaccgaactgtccggtctggatgacttccaccaccccgaagaggcaatcgataccgcgcagaaactgttggcagaaacctacggtgcagatcgttcctttttcctggtgaacggttccaccgtgggtaacctggctatggtgtatgcagtgtgtcaacaaggcgataccatccttgttcagcgtaacgcacacaagtccgtgtttcacgccattgaattggtcggcgcgaaaccggtgtatcttgcacccgaatgggatgaccacacccgttccgcaggcgtcgttccacttgaaaccatcaaggaagcgctgcgtgaatatccagaggcgaaagcactgttcctgacctacccaacctactatggtgtcgtcgctaaggacttgcgtgaacagattgaactgtgtcacgcacagcagattcccgtcctggtggacgaggcacacggtgcacactttaccgcatctaaggagttcccgatctctgcactggaactgggtgcggatattgtggtccactccgcgcacaaaaccctgcccgcgatgaccatggcgtccttcatgcacattaagtctaaattcgtgtctgaccagaaagtcaaccactatctgcgtatgcttcagtcttcttccccatcctacctgttgctggcgtctcttgacgatgcgcgacactacatctctaaatacaaagaatccgatgcagtgtactgtctggaacgccgtaaacaatggatcgaagcgctggaatccatcccggaactggaactgattgaagcggatgaccctctgaaggtgtgcatccgaatgaccggctataccggcatcgagctgaaggaagcaatggaggaaaacctgatctaccctgagttggcagacatcgatcaggtgctgctggtcttgccactgttgaagcacggcgatttgtatccctacgccgaaatccgtattcgaatgaagcaggtggtcacccaactgaagatgaagaaaggttctggtcaaccacagatgggcaagcaatataaaatggcatctattatcaccccaaacgcgaccttcgcagaaatcgaggcaaaagaaaaggagtggattccgtacatgcgatctatgggccgtatcgcgggtggcatgttgatcccctacccaccaggtatcccactgttcgtgcccggcgaaaagattaccgtgtctaagctgtcccagctggaggagcttttggcaattggtgcggcattccagggcgaacaccgtcttgaggagcgacttatccaggtcttgaaa

SEQ ID NO: 177 - DNA, 1134 bp, Azospirillum brasilense
atgactgataagatcgcgcgtttctttgaagaacagcgtccacagaccccatgcctcgtggtcgatttggacgttgtggaggcaaactaccacgatctggaagaggcgcttcctgacgcaaagattttctatgctgtgaaagcgaatccagcacctgaaatcctgggtttgctgactcgtcttggctccgcctttgacaccgcttccgtcccagagatccagatggttctggcagccggatgtgcacctgaacgtatctcctacggcaacaccattaagaaagaggcggacatccgtcgagcattcgaattgggcgtgcgtttgttcgcctttgactctgaagctgagctggaaaagattgcccgtgctgcgccaggcgctcgcgttttctgccgtatcttgacctctggcgagggtgccgaatggcctttgtcccgtaaatttggttgtgatttggcaatggcacgtgaattgctcttgaaggctaaaggcatgaacgtggtgccatacggcgtgtccttccacgtcggctcccagcaaaaggatctgatgcagtgggaccatgcgattttccaggttgcacaattgtttcgtgagctggaagtcttgggcgtggatttgggtatgatcaacttgggcggcggcttcccgactcgttaccgtaccgacgtccccgaaaccactgcgtatggccaagcaattttcgaatccctgcgcacccactttggtaacagacttccagaggccatcgtggaaccaggccgcagcatggtgggtaatgctggaatcattgagtccgaagtggtcctggtgtcccgtaagtctgcgaacgatgttaaacgatgggtgtacttggacatcggcaagttctccggcttggcggaaactatggatgaagcaatccagtatccgattcaagtgatgggcgatgacggagagggcgactccgaagccgttgtgctggctggcccgacctgcgattctgccgacgtcctttacgagcgtgctgaatataagctgccaatggatttgaaagccggcgatcgtgtgcgtatccacgccaccggagcttacaccactacctattccgcggtgtgcttcaacggctttgcaccattgcagcaaatctgtatt

SEQ ID NO: 178 - DNA, 1143 bp, Rhodobacter capsulatus
atgggcctgagcaagaccatctggactcagccgtcagagatcattcgtaccaaacaaccggatcaccccgtccttgttttctcccccaccgcattgcaggcaactgcccgtcgattcctgaagggtttcccaggcgtggtcacctacgccgtgaagtccaaccctgacgagatggtcatccaaaacttggtggcagccggcgtcaagggtttcgatgttgcttcaccatttgaaatcgacttgattcgtcgtttggcaccaggcgctgcgctgcactatcataacccagtgcgtggccgtgaagagatcgctcacgcggttcgcgcaggcgtgaagacctggtcggtggattcccgttctgaacttgacaagttgattgagatggtcccggcagaaaagtgcgagatctccgtgcgtttcaaattgcccgtccagggcgcagcctacaacttcggcgctaagtttggcgcaaccgccgatctggctgcggaattgctgcgtcgagcagccgacgcgggtttcatcccatctttgacctttcacccaggcacccaatgcaccgatccagctgcgtgggaagcatatattctggtcgcctccgagatctgcgctaccgcgggcgtccgtgcacaccgattgaacgtgggcggcggcttccctaatcatcgaaaaatgggtccagctcctgttttggaagatattttcgcgctgatcgaccgcgcaaccactgaggcctttggctccgatcgtccgattttggtctgtgaacccggtcgtggcttggtgggcgatgcattcacccacatcactaaggtgaaagcccttcgtgatgacacccatgtgttcttgaacgatggtgtgtacggcggtcttgcagagcttccactcatcggcaatattgaacgaatcgaggtctggtccccagaaggtttcgagcgtggcggcgatatggtcgaaagaattgtttttggcccaacctgcgattcggtggaccgtttgccaggcgatgtcgcattgccagcggaattgtccgagggcgactacgttgtgttccacggcatgggtgcttattgttctgcgaccaacactcgtttcaacggatttggccagatggaaatcgtgaccgcattggccctgaagggc

SEQ ID NO: 179 - DNA, 1908 bp, Pseudoalteromonas sp.
atgctgccgttgctgcgtattcttctcatcgagcaggacccaagcattttgaaggaattgtccaccaacttgtcaaaaactatcgcaaatttcgaacgctccgacatccacattgacatcattgaacgtttggaattgaaggaagcacttgattgcgttgaagaggatggtgacatccaggccgtggtcttgagctgggacgtgcaaaacaaggtcggagagaaaatgtactcccgtttcatcgaacagctgaagcgtatccgtttggaattgccagtgtatgtcatcggcgatgacaccaaaggcttggaaattgtcaacgaatctgaagagatcgaatccttcttcttcaaggatgaagtgatctccgatccagaagctattttgggctacatgatcaacgattttgatgaccgtagcgaaaccccattctggactgcgtaccgtcgatatgtcggcgagagcaatgattcatggcacaccccaggccattccggcggctcctccttccgtaactccccatacatcaaggacttttaccagttctatggaagaaatgttttcgtgggcgatttgtccgtgtccgtggattcccttggctccttgtcggattccaccaacactatcggccgtgctcaggagtctgcagccgctacctttgaagttaagcacacctacttcgtgactaacggctcctctacctctaacaagatcattctgcagaccttgctgcgtaagggcgataaagtcatcattgaccgaaactgccacaagtccgttcattacggcattttgcaatctgcatccttgccaatctacttgtcctccatcttgaaccctaaatatggcatcttcgcgccaccttccctggcagatattaagcaggccatcgaacaaaataccgacgctaaacttctcgtgctgaccggctgtacctacgatggtttgctgtccgaccttaagcaggttgtggaatttgcgcaccaacatggtattaaagtcttcatcgatgaggcctggtttgcttactccttgttccacccatccttgcgatactattccgctatccatgcgggcgcagactacgttacccactccgcgcataaggtggtgtccgcgttttcccaggcatcttatatccacgtgaacgatcctgacttcgatgcagactttttccgtgaaatctactctatctatgcatctacctctccaaagtaccaactgatcgcatccttggatgtgtgtcagaagcaattggaaatggagggttataaacttctcaacgctttgctgaatcacgtggaagagtttaagcagcaaatggcatccttgaagcagattaaagtcttgggcaaacaagatttcatggagatctttccacacttctccggcgataacatgggtcatgaccctttgaagatcctgattgacatctctgaattgccgtacagcttgaaggacatccacaaatacttgttggatgagattggtctggaaatcgagaagtatacccactcgactatcctggtcttgctgaccttgggcggcacccgctccaaaatcattagactgtacaacgcattgaagaagttggattccggcaaggttaaattggccacctctacccgtcgttcccgtttgccagaaaacttgccagccattgacttggcttgcatcccttccgaggcattctacggtgagcgtgagtctgttccgatttccaagtctaacaatcgaatctgtgctggcctggtgaccccatacccgcccggtattccgcttttggtgccaggccagcacatcacccaagagcatgtcgattatttgaaggaactggctggtcagggcttgaccattcaaggctccttcgacggcgaaatctacgtgctgaagggcaaagccaacaaa

SEQ ID NO: 180 - DNA, 1413 bp, Clostridium sp.
atgagcaacaaaaccccattgctggacgaggtcctgaagtacaagaaagaagagaaccttatcttctccatgccaggcaacaagtgtggcaaggtcttcctgaaagataacatcggcaaggagtttgttgacactatgggctacttggacatcaccgaagtggacccattggataaccttcacgctcctgaaggcatcattctggaggctcagcaacttctcgcgaagacctacggcgttaagaaagcgtatttcatggtgaacggctctaccggcggtaacttgtgtagcatcttcgcagcctttaacgaaggcgatgaggttttggtggaacgtaactgccataaatccatctacaatggtctgattcttcgaaagttgaaagtgaagtatatcgaacctttgattgatgagaagctgggcatcttccttccacctgacaagaaaaacatctacgatgctattgaacagtgcgagaacttgaaaggtatcattttgacctacccatcctattttggaatcacctacgacatcgaagaggtcttgctggatctgaagaaacgtggccttaagatcgtggtggattctgcacacggcgcacacttcattgctaacaacaagttgccgaaggcgatctacggcattcccgattatgttgtgttgtccgcacacaagaccctcccggccttgactcaaggttcttacttgttgagcaacaccgatgacaatgccgttgagttctacttgaacaccttcatgaccacctctccctcatacttgatcatgtcctctttggattatgcacgctactatctggacgagtacggctatgatgaatacgagcgccttatcaacaaagccgaaaagtatagatcaatcattaactcgctgaacaaggtgcacatcatttcaaaggaagatttggctgaggattacgacatcgataagtcccgttatattgtcaccgtttccaaagagtactctggccataagttgctggaatatctgcgtgagcagcgaatccaatgcgaaatgtcgttcgcgtccggtgtcgttcttctcttgtccccaatcaacgatgacgatgacttcaagaaactgcttaaatcttttgaaaacttgcagttgaaggacatccgccaagataattacagcaagtactattccttcatcccgaagaaagtgttggaaccctacgaggtctttaagaaagaatgcaagtacatcaagattaacgaggcagacaagaatatcgcatgtgaagccatcattccatacccgcccggtattccactcttgtgcccaggcgaagtgatcaccaaggaagcaattgacatcattgatgactacatctcgaacaatcgatccgttatcggcattaaaaacaaggaatacatcaaggtggtcattgag

SEQ ID NO: 181 - DNA, 1230 bp, Sphingomonas mucosissima
atgcaccaggatcatcgcgcccttggcttggctccactgtctaccgttgcacgtacctctgtgtctggcgcgatcgacattgcacagggcaagcctgtccaaccggttaccttggtgcgtcctcacgcagccgctcgcgcggcacgtttcttcgtggagaagttcccaggccgttccatgtacgccgtcaaagctaacccctcaccagaattgatccaaattttgtgggataatggcatcacccatttcgacgtggcgtccattgcagaggtccgcctggttgctagaacccttcctgatgcgactctctgctttatgcacccggttaaggccgaagaggcgatcgcagaagcctatttcacccacggcgtgcgtaccttctccttggattctctggacgaacttgagaaaattatgcgtgccacccgatccgccgctgatttgactctgtgcgtgcgcctgcgtgtgtcctccgagcacagcaagttgtccttggcttcgaaattcggcgtcgcaccacacgaagctaagccattgctgtttgctgcacgtcaggctgctgatgcattgggcatctgcttccacgttggctcccaggcaatgaccccggaggcttacgcggatgcaatggaacgtgtccgagcggcaatcgttgacgccgctgttaccgtggatgtcattgatgtgggcggcggcttcccatcctcctacccagatatggcaccaccaccattggaacgttatttcgaaaccatccaccgagcgtttgagtccttgccaatctcctactccgctgagctgtgggcagaaccaggccgtgcattgtgcgctgaatactcctccgtggtcgttcgtgtggagaaacgtcgaggcaacgaattgtacatcaatgatggagcgtatggcgcattgttcgacgcggcacacattggctggcgctttcccgtcacccttctcagagaaccacagtccaccgtgcgtgatcaccctttctctttttacggcccaacctgtgatgacctggaccacatggcaggccctttcttgctgccggccgatgtgcaagctggtgactacgtcgagatcggcatgttgggagcgtatggctccgcaatgcgtaccgccttcaacggctttggttccgatgaaaccgtgatcgtggaagacgagccaatggtttctctgtacaccgaagtggagcgtgaagccgctagcaacgtggtcaaactt

SEQ ID NO: 182 - DNA, 1452 bp, Unknown
  Description of Unknown: Butyrate-producing bacterium SS3/4 sequence
atggatcgtgaacgacagaagaaagccccgatctacgaagctctggaggcgttcaagaaaaagcgtgtggtcccgtttgatgttcccggccacaagcgtggccgtggaaaccctgaattggtccaattgctgggcgagaagtgcgtgtccttggatgtgaactccatgaaaccgctggacaacttgtgtcatcccgtctctgttatccgtgaagcagaagaattggcagctgaggctttcggagctgcttccgcttacttgatggtgggcggcaccacctctgctgtgcagtcaatgatcttgtccgtggtgaaggcgggcgataaaatcattttgccacgtaacgtccacaagtccgtgatcaacgccctggtcctttgcggcggcatcccaatctacgttaaccccgaaatgaatcaacgactgggcatctcccttggtatgcaggtggaaaaggtcaaacaagctattgaggataacccagacgcagtggccgtcttcgttaacaatcctacctactatggcatctgctccgacatcaagactattgtgcagctcgcgcactcccgtggcatgaaagtcttggcagacgaggcccacggcacccacttgtactttggcaagaacttgccaatctccgcaatggcagctggagctgatatggctgcggtgtccatgcataagtccggcggctccttgacccagtcctctcttctcttgctgaacaaaggtgtgaataccgattacgtccgccagatcattaacctgacccaaaccacctctgcttcgtacttgttgttgtcctccttggacatctcccgtcgtaacttggcattgcgtggcgaagagtctttcgcgaaggtcgttgaaatggctgagtacgcgcgtcgtgaaatcaactccattggcggttactatgcatacggcaaggagttggtgaatggcgattcaatctttgattacgacgttaccaagttgtccgtgtatacccgtgacatcggtcttgccggaattgaagtgtacgacctgcttagagatgaatatgacatccagattgagttcggcgacatctctaacattctggcttacatcagcattggcgatcgtatccaagacattgaacgtttggtgggcgcattggatgacatcgagcgattgtacaagaaggattcctccggcttgttgtcgggcgagtatatttccccaaaggtggtcatgtcccctcagaaggcattctactccgaaaaagtgtctgtccctgttgaagcatcctccggccgtgtctgcgccgaatttgttatgtgttacccacctggtatcccaattctggcaccaggcgagatgatcaccgatgacgttgtgcagtacattttgtatgccaaaaagaaaggttgctccatgcaaggcaccgaagatccagcagtggaccacttgatggtcttggccaacatc

SEQ ID NO: 183 - DNA, 2142 bp, Francisella sp.
atgaagtccgtggtgttcatctacccagataacttgaagccttacaaagaagagttcctttctaagatccagagcgatttggaagccaagaaataccttaccttggtcatcgacaatatgcaagaagttgtggagatcttggaagaaaactcccgtgtgtgctgtatcgttttggaccgttccaccttcaacttggaagcattccacaatatcgcacatattaactccaagctgccaattttcgcggtgtccgattacggccagtctatcaagttgaacctgaaggacttcaacctgaacatcaacttcatccaatacgatgcgcttgcatcggaagactccgagttcatccacaagaccattgcaacttacttcaacgacatccttccaccttttacccatcgcctcatgcagtatagcaaagagttcaactcagtgttctgcaccccaggccaccagggcggttacggattccaacgttccccagtgggcaccttgttctacgatttctttggcgagaacattttcaagaccgacgtctccatctctatgcaagaactgggctccttgttggatcactccggtgttcatgaggacgcagaagagtacgtgtccaagattttcaaatctgatcgttccttgatcgtgaccaatggcacctctaccgccaacaagatcgtgggaatgtactctgtcgctgatggcgacaccgtcttgttggatcgtaactgtcacaaatctcttacccacttgatgatgatggtggatgttaatccggtttacttccgccccaccagaaacgcctatggcatcatcggcggcatcccaaagtccgagttccgtcgtgatgttatcgagaagaaaattgccgactcaaacatcgctaccgaatggccgtcttacgctgtcgttaccaactccacctacgatggtttgctgtataacaccgacactatccaccgtgatcttgacgtgaagaagttgcattttgattccgcgtggattccatacgcaattttccaccctgtttataagcataaatctggtatgaccatcaagccaaaggaaggccacactgtgtttgaaacccagtccacccataagttgctctcagcattctcccaggcatccatgatccacattaaaggcgactacaatgaagaggtcttgaacgaatccttcatgatgcacacctctacctctccattctatcctctggttgcgtccaccgaaaccgcagccgctatgatggaaggcgagcagggcttcaacttgatcgataagaccattaacttggcaatcgacttccgtcgtgaattgctgaagttgaaacgtgaatccgaaacctggttctttgatgtgtggcaacctgaaaatatcgcgaacaaggaaacctgggcgctgcgaaacgcagatgactggcacggtttcgaagaggtcgatggcgatttcttgttcttggacccagtgaaggtcaccattttgaccccaggcatcgaagacaacaatattcagaagaacggtatcccggccgatgtggtcgctaaattcttggaagaacacgacatcgttgtggaaaagtccggcccatactcgttgttgttcatcttctccattggcaccactaaggctaaatctatgcgtttgttgtccgtgttgaacaagttcaagcagatgtacgatgaaaacgcgctggtcgagaagatgttgccatccttgtacgcaatcgaccctcgtttctacgaaaagatgcgaatcaaagatatttcagacaccttgcactccttcatgtacgagtccaagttgccaaacttgatgtatcacgccttcgatgtgctgccggaacaggagatgaacccacaccgtgcttttcaaaaacttctcaagggcaaagttaagaaagtgccattgaccgaactgtacggtaacacctctgccgtcatgattttgccttatccgcccggtatcccgttggttttgccaggcgaaaagatcaccgaggattcgaaaatcatcttggagttcttgctgatgctggagaagattggctcccgtttgccaggcttcggcaccgacatccacggcccagaacgtgcacgtgatggcaccctgtacatcaaggtcatcgatccagacatcgag

SEQ ID NO: 184 - DNA, 1419 bp, Thermoanaerobacter thermohydrosulfuricus
atgaccgcaccattgtacgaagccctgatggattatgctaagaaccagatcattccgttccacatgcccggtcataaacaaggacgtacctttccgggtgaataccttgtgaacttggccaagatcgatttgaccgaggtccccggtttggacaacctgcacaatccggaaggccccatccttgaggctcagaagttggcagccaaagcattcggcgcacgtgaatccttcttcttggtgaacggcaccacctctggtatctacgctgcgatgtatgccgtccttaatccagatgacaagatcctgattatgcgtaactcccacaagtccgtgtacaatggtttggtcctgaccggcaccgtgccagtttacatcaaccccgaaattgattatgaggacggcatcccaatgggcatcgatattaacaagttggaagagtacttgaagaaggatgaagctatcaaagcggtggtcatgacctaccctaactactatggattctgctccgacatcaccggcatttctgacatcgttcacaagtacaacaaaatcttgattgtggatgaggcacacggcgcacacttcccattttctaacaacttgccattgtcctccatccaggctggcgcggacattgttgtgcaatccgttcacaagaccttgtcctccttcacccagtcctccatcttgcacttgaactccgatcgtgtggataccaatcgactgaagtactcattgtccttgttccaatccacctctccgagctatatcttgatgtcctccttggacatcgcccgcgactacatggaaaaggaaggcaagaaccgtttggaaaaggctatcattctcgctgattacgcgcgttatgaaattaacaccatcgagggcattcgatgtttgggcaaggagatcgtcggcaagtacgcgattgttgatttcgacaagaccaaattgaccatctccgtgaagaacttgggcattaaaggtcctgaagcggagaagttcctgcgtgaaaactttaatatccaggtggagatggcagatacctttaacattttggcgatggtcactctggcagatgacaaggaaaaagttgacttgctgatcaagggcatcaagggcttggcgaacgttaagaaagataagaaaaccgcagaagaggtggcagcctacccagacaccccagaaatggtgctgaagccgtccgaggctgtccgccaaaagaccaagttgatctccttggaagaagcagaaggccgtgtgtccgctgatttcatcattccctacccacctggtgttccattgatctgccctggcgagcgtattaagaaagacatggttaagtacatcaacgtgctgtataacaagggcatcaaaattttgggtctgaagaacaattcccttctcgtgtgtgaaatc

SEQ ID NO: 185 - DNA, 1539 bp, Brevibacterium linens
atgcatcaagattcccctatgacatccgcctccgaccattccgcctttcctggcacggcaaaaacatacgccccttacgctgacgccttacaggcggctgcaaaacgggattccctgtttttaagcacgccgggtcatggaggcacaacgacgggcatttctgcaggtcaagcggaatttttcggcgaacatacactttcactggacattcctccgctgtttgatggcatcgacctgggtgttgacacgcctaaagatgaagccttacaactggcagctgaagcatggggtgcgcgtagaacgtggtttctgacgaacggttctagccaaggaaaccgtatggctgcattagcgattggtacactgggaacgggagttgtgacgcaaagaagcgcacatagcagctttattgatggaatcgtcttggcaggtttaaatcctggatttgtaagcccgaatgtggacgaagtaaatggcatcgcgcatggtgttacaccggactctttacggcatgcaatcgccgcacatcctgaaaaagtgtctgcggtttatctggttacaccttcatactttggagcggtcgcagatgtgtcagctctggctgaagttgcacatgaagcaggtgctgcactgatcattgacgctgcgtggggagcgcattttggttttcatcctgatctgccggaatccccggtcacacttggcgctgacattgtcattatgagcacacataaactggcaggctcctttacacagtccgcattactgcatttgggcgatacggaatttgcaaatcgccttgaaccggcattagctcgtgcctttatgatgacggcaagcacaagcgaaaacgcacatctgatggcgagcattgacatcgcgagaagagacctggttaactcccaggatgcgattgcagattctctggacaatatccggcaaattcgtgcaagaattgaaggcagcgaacattaccatctgctttcaggagactttatgaaccatgcagatgtggttgacatcgacccgtttagactgccgatcgacatcacaagcacgggcctggatggacatgcagtgagaaaacgtctgacggaagaatttgatatttttgcagaaatggcgacagcgacaacaattgttgcgctgatcggaattggcaaatctcctgaccttggtagactgtttgacgcgctggatcaaatcagagcggaaaactccggtacaccgggagcaggaacggccgaaagcgcaacacgggcatcaggcatcccggccttgccgaatgcaggagaactggtagcactgccgagagacgcgtactttgcagaatccgaattggttccggcggcagaagcaattggaagaacgtctgtgtccagcctggccgcatatccgccgggtatcccgaatgttctgccgggagaacgtattacggcagaaacagtcgaatttttacaggcagtagctgcgtccccttctggtcatgtccgtggcggcgttgatgctacactgtctatgtttcgggtccttaaagat

SEQ ID NO: 186 - DNA, 873 bp, Candidatus Accumulibacter sp.
atgaatctgcgcgatcatgttgcagcgcacccgctgcttagacgccattttagatttctgaccgtcactgatctggttccggaagaatttcgcgaatcacaagtggaatcactgtataatattgatacgggatgggcaaacttattgaaagcgtggcgctttgatgaatttgctctggacccgtctcgtgctaccctcgccattggcctgactggaatggatggtgacacaattaaaaacaaatatcttatggataagtacgacattcaaattaacaaaacatcaagaaacactgttctgtttatgacgaacattggcacaacgagatcaacaatcgcatatctgctgggagttcttgtgaaaattgctggcgatgttgacgaacgtgtggccgatatgtcaacaccagagagacgcattcatgacaagagagttagatcactgacactggaactgccgccgctgcctaactttagttgcttccaccaagcctttagaggcagatcactagatggtcgtacagaaacgcgggatggagacgttagaagcgcatttttcctggggtatgaagatggcaattgcgagtaccttacaatggaagagacggctcaagccattaaaaacggtagagaatgtgtttcagcacagtttgtgattccgtatccgccgggcttccctatcctggttccgggccaggtaattagcgcagaaatcttgcagtttatgcaagcactggatgttcgagaaattcatggctttagaccggacttaggctttagaatctacacagaagctgcactggaacaagctggacaggcaaatgcggtctggaaagcccaaatcaactctacagcagcgcaggtagaatccgag

SEQ ID NO: 187 - DNA, 1431 bp, Gracilibacillus halophilus
atgatgaagaaacagcaagtcaccccactgttcgatcgccttcaggactttgcgcagcaacactacgactccttccacgtccctggccataagaacggtagaatcgttgcacacaaaggacaggatttctttgaccaattgctgccactggacgttaccgaattgtccggcctggatgaccttcacgcagcccagggtgtgatccaggatgcccaacgtctggctgcggagtggttcggtgctacctcttcttactttttggtgaacggctccaccgtcggcaacttggcaatgattttggccaccgttactgaaggcgatcaggtgttcatccaacgtaactgccacaagtccttgatccacggcattgagttggctaatgcgcagccgatcttcctgtctcccgattacgacgaagcggtcgagcgatataccgcaccatccttggaaaccattcagcttgcgttccagcaatacccagaagtgaaggcattgatcctgacctaccccgactattttggccgtacctacgacatcaaaagcatgattaactacgcccactcatatcaggttccggtgttgattgatgaagctcacggctgccatttctcccttccgtttgttccctcggattccgctttggactgtggtgcggacatcgtggtccagtcagcgcacaagatgaccccagcactgactatgggcgccttccttcatatccagtccgaacagatctcctcccgtgacatcgaagcatacttgcagatgttgcagtcctcctccccatcctatcctatcatggcatccttggatttggcgagacactacctggcaacctattctaagcagcactggcatcaacttatggccttcatccacgaaattaccacttgttttcaggattccccacactggaaagtgatcgcacacggcgagaaggatgaccctttgaaactgaccatcgcaatcaactcccgtttgtccgtgtccaccgtcgcacacgttttcgaacaggaaggcatttttccggaaatgatcgatgacaatcaattgttgttcgtgtttggcttgaccccacacgtcgatgttgacaacttctcccgtaagttggaatcgatccaccagcaattgaactcctccatcaagcatgccaaaatcgaagagaagcgtatgccgcagttggtgtccaaaattgacacccttcaactctcctaccgagatatgaagcgtcgaaccaaacgctggattcgttgggaagaggccatccaccatattgcagccgaagctatcattccatacccacctggtattcctttcatcattaagggagaagagatcacccgtgatcacgtggactggattcagcacatcttctcctaccatgccgaagtccaacctgctcaccgagagaaaggcttgtacatctatatg

SEQ ID NO: 188 - DNA, 2127 bp, Eikenella corrodens
atgaagaacattttgctgggctgcggtcacaaggagttgggcgattacttgaaatctctgatcgaaaccctggagaagggcggtcacactatccgtattgcacatgacccacaggaaatccttaccttcttgaaacacgatgcccgcatcggctccgttttgtgcaccctggacatttttaacagagaattggatgagcaaatcattgctctcaatgacgaattgccagtgttcattctgaagcctaccgattgtgacaaaccggtggattttggagccgtcggcgaccacgctaccttcatcgattgccacttgttctccaacgaggatgtggtggataagatcgaaaaagcaatttgtcactacatcgataacattaccccaccattcaccaaggccctgtttgattacgtggacaagaacaagtataccttctgcaccccaggccacatgagcggcaccgcattcttgaagtccccagtgggctccttgttctacgacttttatggcgagaacaccttcaaatcagacatctccgtgtctatgggcgaattgggctccttgttggatcactctggccctcataaggaagcagaagagtacatcgcagaaaccttcaacgccgatcactcttatattgttactaacggcacctctaccgcaaacaagatcgttggcatgtactccgtgccagccggctccaccgtgcttattgaccgtaactgtcacaagtccttgacccacttgttgatgatgtcggacatcaccccagtctacctgaaacctactcgcaacgcatacggcatcttgggcggcatcccacagaaggagttcaccaaggaagtgatcaccgaaaagttgactaaggtgccaggcgcaacctggccagttcacgccgtgatcaccaactccacctacgatggtttgttctataacaccgataagatcaaagataccttggatgtgaagtccattcacttcgactccgcttgggtgccctacaccaacttttctccaatctacaatggcaagaccggtatgggcggcaagcaggtcaaggataaagttatcttcgaaacccacagcactcataagttgctcgcagccttttctcaggcatccatgatccacgtcaaaggcaacctgaataccgctactttcggcgaggcgtacatgatgcatacctctacctctccattttatcctatggtcgcttccaccgaagttgctgcggcaatgatgcgtggcaactccggcaagcgactgatgcaggattctcttgagcgtgcggttaagttccgaaaagaaatcaagaaacacaaagcccatgctgattcctggtactttgacgtttggcaaccagaaaacgtggacaatatcgaatgctgggagttgcaccagaccgataagtggcatggcttcaaagacatcgacgcacaacacatgtacctggaccctattaaggtgaccttgctgaccccaggcttggataagaacggtgaacttgagaaaaccggcatccccgccaacttggtgtccaagttcttggaggatcgtggcatcattgttgaaaagaccggcccatacaacatcttggtgttgttctccattggtgttgatgacaccaaggcattgtccttgctccacgcgttgaacgagttcaagtccttgtacgacgcgaatgcaaccgtcgaagaggttctgccccgtgtcttcaacgagtcgccatccttttaccaggatatgcgaatccaggaattggcacaaggcatccactccctgatttgcaagcataaccttcctgaattgatgttctctgcttttgaagtgttgcctactatggtcatgaacccacacaaggcgttccagttggaattgaaaggccaaatcgaggattgttacctggaagacatggtgggcaagatcaacgccaatatgattcttccatacccaccaggcgtgccattggtcatgccaggcgaaatgatcaccgaagagtccaagcctattttggagttcctgatgatgctttgcgaaattggcgcacacttcccaggctttgaaaccgacatccacggcgcttacagacaggaagatggccgttacaaggttaaaatcgtgaaggca

SEQ ID NO: 189 - DNA, 1245 bp, Rhodospirillum centenum
atgggccagatccgttaccgatcggcagtttccccagtgcgtcgatctttcgcccgtcctgtggaattgccggatgtggatgctaccgttgctgccctgcgacctgctgagccacttcactgcttgcgtccagcagtcttgaaggccaccgctcgtcgtttcgttgctgcattcaccgaagcagtgggcggcgatgtcctgtatgccgttaagtgcaaccccgacccagctgttctgcgcgccctgtggaagggcggcgtgcgtcatttcgattgtgcctccccagctgaagtgcgcgtggtgcgttctatgtttcctgaggctgtgatccactacatgcatccggtgaagaaccgcgcagccattagagttgcgtatcgtgagttgggcgtgcgtgatttcgctctggactccgtggaagaattggcgaagttgagagaagaaaccggcgatgcacgtgaccttggcttgatcgtccgattggctctgccaaagggcaacgcgacctacgatttgagcggtaaattcggagcagctcctgatgcagccgctggcttgttgcgtcgagcgcgagcattgtccccgcgcatcggtgtgtgctttcacgtcggctcccagtgtctgaccccagattcctacggcgatgcattgcgtttggcaggcggcgtgatcagagcatccggcgtgccagttgatgttgtggacgtgggcggcggcttcccagtgtcctacccagatatgaccccaccaccattggatgcatatatggaagcgatccgtgcaggaattgctggcttgggtctgccagctggcacccgtgtgtggtgcgagccaggccgtgcattggtggcagcaggttcctctgtcgttgtgcaagtggaaaagcgtcgtggcgatgagcttttcgttaacgacggcgtgtacggctccttgtcagatgcaggtgtccctgccttccgttttccgtgccgtctggttcgacctgcaggcaccgatactgcaccattgatgccattctccttttggggtccaacctgtgattcggcagaccgtatgaaaggtccttttcttctcccggccgatgttcgtgaaggcgactggatcgagattggacagcttggcgcttacggtgcgaccctccgtactgagttcaacggttttgatcaagcacgattggtggaagtcgccgacggcccattgttggaaaccccaggccacggcgtgccagctcgtctgccagcgaag

SEQ ID NO: 190 - DNA, 1407 bp, Anaerobranca californiensis
atgaagatcaagaaacttcagaacttgtacatctacaacaagaacaacaagaagcgttacatcaaattccacatgccaggcaactatggcggcaagaacttgaacaagaagttccgtaagtacatgccgttctttgaaaccaccgaagtgtacggcaccgatgactatcacaacccacagggaatcattaagaaagctgaaaagtccaccgcgaagttgttcaactcgaatcattgcatctacctggtgaacggctcctcctccggaatcattgcagccatctcttatctttttcgcgaaggcgatcaaattttggtgtcccgtgattgtcacaagtccgtgatctacggcttgatcctcagcggcgctgagccggtgttctccgaacattcgggagcgtcccccttggattaccagggcatccagcaagcaatcaagaaaattgagcgtatcaagggcatcattctgaccaccccaaactactatggaatcggcaacaaggacttgaagctgattgttcaattgtgcaacaagtacaagatcaagttgttggtggatgaagcacacggctcccacttgtacttcaccgacttgaaggtctatctggcaaacacctgtaaggccgatttggtggtcaactccacccacaagaacttgactggtctgacccagaccggcgtgatcaacattaatgcagaggacatcaacctttccgaattgcgcaagcatatttctctgaccacctctacctctccaagctacatccttctcgcatccattgcctactgcaccgagcagtatactcaaattggcgaaaagatcttgcaaaagaccatcaagaaaggtaactacatgaaggagttgctggataagtacaagatccgatacatcaaggaaaaggatcttaactccaatcagtacttggacccaaccaagatcactttgttgttcaaggataacaagaaagctaaagaggtgtttaagcaacttatcaaaaacggcatcattcctgagttcctcgcggacaacaagatcttgctgtttatcaactacaaaatttctaagcgtgagttggtgaagaccgctgcgatcctgaaacgtttctccaccgaagaggaagacatcttgtactcacaggaaaactgtttccgtattcgaaataccggcgtcctgaccccacgtgaagcattctattcccagaaagaaaagatccctttgaagaaagccaaaggcaaggttgtggtccaaccgatcaccccatacccacctggcatcccaattcttttccctggtgaagttgtgaccgaggaaatcattaaatatctgaagaactccaacttctcctccattcacggcatcgagaacggtatgatcgaagtcgttaaggataagttctttgatgacaag

SEQ ID NO: 191 - DNA, 1473 bp, Bacillus coagulans
atgatccgtggcaccgatatggaccagaaccgaatgccgcttttcgaagcattgtgccgttaccaacacactaacccagtgtccttccacgttcccggtcataagaatggcttgctgatcgaaccccttctcaaagagtcagcatccttcttgcagtatgatgcgaccgaactttccggcttggatgacttgcaccatgcagaaggagccattcaggaagcacaagatttgctggccgactactatggctccgagaagtcttacttcctggttaacggctccaccgtgggtaacttggcaatgatcttgtccgtgtgccgtccaggcgatcgtgttctggtggaccgtaactgtcaccagtctgtgcttcatgcattgcgtctggcacgagccaatccagtcttcgtttttcctgaaattgacgaagagttgcagatgccagccggcttctccgagaaggtgttcgtccaggcatttcgccaatacagagatgtgaaagcctgcatcttgacctatcctacttactatggcattacctgtgacctgcgtgctgtcgcggaaatcgctcaccagaacggtgcgtacgttttggtggatgaggcacacggcgcacacttccaagtcggctccccatttccagaaaccgcactgcaccagggagctgatgcagcagttcaatccgcacataagatgttgccagccatgactatgggctccttcttgcacattcgtgcaccacacttcccctttgagagattgaaattttacctgtccgcattgcagtcctcctccccaagctatcctatcatgatgtccttggattacgctcgatggtatgctgcgaacttctcccgcgaagacatttgctacaccttgtcgcagcgcgagcaattttccgcgagactgggcaagatgcttaagttggaagagaaggaaggtcaggacccattgaaacttctcgcagccttcccaggcttgtctggcttcaagttgcagtccgtgttggaaaaagcaggcgtttacaccgagatggccgatcttcaacgtgtggtcttcgtgctcccattgctgaagaacggaatgccatttccttatgaagacgctgcgggtcgtatcgaagcagcattggcaggagcatccccacaggcaggtaatcaacctcgtctggaacgagctgagcagaagccagcgtcaggagaaaccgctggcttggatgcgttgcaaggcctgactgaattgcacctggcctacgacgagatggaagagaaagaagctgagtgggtgtccttcgaagaggcgaagggccgtatcgctgcgaaaatggtcaccccatacccaccaggcgtgccacttttggtgccaggcgaacaggttcgtgatgcccacttgtatcaaattcagcaactgcgagcatgtggcgccggtttccacgctgacgcgcctttctttgagaaccgtctggctgtctaccga

SEQ ID NO: 192 - DNA, 1401 bp, Gloeobacter violaceus
atggaaacaacgccgctttgggatgcgttaagagcggtcgctttagcctcaggaacaggttttcatacgcctggtcataatggcggagcgggcttgccgcctgctctgaaacattggccggattggggccgcctggaccttacagaattagcgggattggacaacctgcatgctccgacgggtgttattgcacatgcgcaaagattagcagcggctgtatggggcgcggaaagaagctggtttcttgttaatggtgctacagccggcattcaagctatgctgcttgccgcacttggccaaggacagaaagtcttagtaccgagaaactgccatcagtcaatcgtacatgcgttagttttgagcggcgctgttcctgtgtttgtccaaccggtgtgggatagacgctggcagcttgcacatggcctgacagcaacaacggtagaagcggctctggccgttcatcctgacatccgtgcggttgtggctgtgcatccgacatattttggagctgtcggtgaaacgagagcaattgcgcgcgtggctcatgccaaaggcatcgccttattggtcgatgccgcacatggagcacatcttagatttcatcctgatcttccggaatgtgcgttagcggctggcgctgacttagtcgtacattctgcccataaaacacttccggcattaacgcaagccgcactgcttcatcaacagggcacactggttgatccggcccgtgtcgaaatggcattaaatttattgcagacaacgtcaccgagctacctgcttatggcgtccctggaccttgcaagagcacacatggttagacatggacgcgaacagttgggtcatattctggaaatggcgcatcgtcttcggcataaactgccgtttgctgtgttaggtggcgatggcacacctggatttgacccgacgcgcctggtgatcgatgtcggtgaaaaaggctggtctggacatgcggctgaaacatggctggaacaaaatgcacaagtgcgtgccgaaatggcaacacatcggcatttggtctttattctgaactctgcccatacggaatttgatggcgaacaattgcaggcatccttattggctctggccacggcacaacctacaggagctacgccgcctgacctgcttccgcctccgttgcctgaactgcgttattcaccgcgggaagcatttggccgttctcatcggtccgtaccgttagccgcagcggctggactgacaagcgctgcagatgtctgcacgtatcctccgggagtacctgttttattgccgggtgaagttgtggcggctcagtcagtcgaataccttggagccgcaattgatacaggcgcagaaacggtaggaatcgacggtagaggccatattcgcgttacaatcgat

SEQ ID NO: 193 - DNA, 7470 bp, Plasmodium malariae
atgaactccgtcaacgactccatgtattctggcgataccaactccctccacgtgaactccttgtacgaaaacaatcctgataagtccgtgaagaacatcaacgctgtcaacgactacattacctcttctaacgcgatgtccgaagaggcagaaaccgcagccggcaacgatgagctgatcccaaactcctcctccaatcacattcattcccagtacaagcaccgtcatcagtataaacaataccaccagtataacccacacaaccaacataagcagcaccatcaatacaagaaattgcacccgtacaaacagtatcatcaagaaaaggagcttcccaaatatcaaccgctcccccagtaccaacactctacccagtatcaaggctccaagcctcactctcagagccaactgcatgacggcggcaagaagcgtcgtgaaaagggtaaagttgagcgaaacaagtacgataagatcgaagagttggaaaagtacatcaacattaacaatgcgaccaacgtgtgctcccttcgtatcaagttgtgggaagcacttatgctctacgttaacaacttgaaaatcgagctggtgtacttcatcatctactgtctggaagagattgaagtgtactggggcgaagaggcaaccgacaacttgcgtgacatcatcaacttgatcaacgataagaaatacaaggaagtgctgaacaaaattggcgagaccttgtcctctctgtccgtcaccactggcaagaccactgaagagaacccattcttttacaccttgatcgtgtccggccgtcgtgacgaaaacaataataataacaacaacaactccaacaataactacaactacaacaacaacaactctgatcttggttgcgaattgaacaagatcttgcactatgagcataaccgtcttagcaaccagtcaaacaacaagaaattggaatacaagatcattgaggcttccaacgcgaaagaagcattgctggcctgtctgattaaccctcaaatcctgtccgtggtgttggtggataacttgaccatcgatgaagagaaagttaaagaacgtgactactataagttcaacgaggataacatgttgaatgctaactgcgcaaactcctcctacttgttgaattgtaaccttcagaataacacccaaatggtcatgaagaacccgttgaatcacaacggcatgatgcattccggcggcgtgaccactgttcagaactccaaggatgttttgctgatcggtaactccatgttgcccgaatacctgaacaacaacaacgtcaacatcaacgaaaactccaacgttcgttccttgcgttccttgtacatcaagcgtaactacaagttcgacattggcgatttcgtcatcggatacgaacaactggtttccgcgccacttgagaagatgaagaaaggcttcaacatcttggtcatcctgattaaatccatcgcatacattcgttcctccgtggacatcttctgcgtgtgtacctctattaccttggataagttgcacagcgtgaataacaaaatcattcgaatcttcaccactcacgatgaccattcggatttgcacgaatccatcttggatggcgtcaagaaaaagattaagaccccattctttaacgcactgaaagcatacgccgagcgacctatcggcgttttccacgctttggcaatctccaagggtaactccgtgcgtcgatctcgctggattcagtccttgttggatttttacggcgtcaacttgttcaaggccgaatcctccgctacctgcggcggcttggatagcttgttggacccacacggctccttgaaggaagcacaaatcatggctgcgcgcgcatacggctccaaatattgtttctttgtgaccaacggcacctcttcttccaacaagatcgtcatgcaggccttggttaaacctggcgacatcattctggttgatcgtgcttgccacaagtcccaccattacggtttcgtgctttctcaggcattgccatgttacttggacccatatccagtgtcccgttacggcatctatggtgctgttcctatctatgtgatcaagaagtccttgttggattaccgtaactccaacaagttgcacctggttaaattgctgatcctgaccaactgcactttcgatggcattgtgtacaacgtcaagcgcatcattgaagagtgtttggcgattaaaccggacttgatcttcctgtttgatgaagcatggtttgcatacgcctgcttccaccccatcctgaagttccgtaccgcgatgactgtcgcagaaaagatgagatccaaggagcagaaacgtatctactataaggttcacaagaagttgttgaagaagttcggcaacgttaaatctctgaaccaggtgtccgccgataagttgctgaaaacccgattgtacccgaacccctccgaatacaagatccgcgtgtatgctacccagtctattcacaaatctcttacctctttgcgtcaaggctccgtgatcttgatctccgatgacaactttgaatcccatgcctataccccattcaaggaagcatactatactcacatgtctacctctcccaactaccagatcttggcgaccctggatgcaggccgtgcccaaatggaactggagggttacggcttggtggaaaagcagaccgaggcagcattcttgatccgaaaagaattgtcagaagatccaatgatttcccgttactttcgaatcctgaacgccgaagaccttatccccgattccctccgacaatgcgctgtttcttacatgaagcgcaaaaagaaaatcattaaagagtacgattcctccgattcccgttgctcggccaacgtgacctactcctgtgtctctaataacaatacccgtggcatcgtggacccatccgattctggcaagtactatctgagcggtgaacagaacgttgtgcactccgtgaacgcatcctccttcgagtgcgtccgtggcaccaacggcgcaaccaactccaaccacaccaacaatagcaccacctctaacaatcgagccaactccccggctcgcaactgccacgtgaagtcccccacctctaactaccataccaacaattgtccgacctctatccacattggcacctctgtgatgctgtcaaataccaactccaacaatatcgttcagggcaacaataacaataacgtgaagtcctctaataactctccccgtagcgcattgaacggagtggctgcgaagtccaccgaaatcgttgagtcatacacctcttgcaacatctactccgaagactctgattaccagaaggtgtccaagtccggtaacatcaagagatacatcaagaagaagaagaaccaaaactgccgtgaggcgccgtgtgtctcctacgatggctccaacttctcaggtgcaaactccgaaaactgcgagaattgtgaaaactccaagaactcccgtaactcccgtaactcccagaactcccgtaactcccgtaactcccagaactcccagaactccgaaaatgagaacttgtccttcttggaaaactccaacaacaagcgttacaacaactcctacggctactcctccggcctgaaaaactttcttgagtacttcgaatgctcatggctttcggaagacgagtttgtgttggacccaacccgaatcaccttgttcaccggttattccggaattgatggcgaaaccttcaaggttaaatggctgatggacaagtacggcatccagattaacaaaacctctatcaactctgtgttgttccaaaccaacattggcaccactggctcctcctgcttgttcttgaagtcctgtttgtccttgatctcccaggaacttgatcagaagaagtccttgttcaacgaacgtgacttgaaccagttcaacgagaacgtcttcaaccttgtttccaattatatcgatttgtccgagttctctgaatttcacccactgtttaagaaacgatacaccgaccctaagatcttcaacaaagaaggcgatattcgcaaggcgttttacctggcatacgaagaagattacgtcgagtatatccttctctccgatttgaaggaacgtattcgacagaacgagatgatcgtttcggcatcctttatcattccgtacccacctggcttcccagttttggtgcctggtcagattgtttcccaagaaatcgtggattacttgagcggcttgtccgtgaaggaaatccacggctatgacgagaacattggcttccgttgcttttacaacttcgtgctggagtacttctataacatggtcatctccgacccctactctttgtatcagaagattgataaagagacctacgaaaagttgaaacacatgtctctgagcaagcgtaagtccttggaatccgtgtgctacctttatatctacgataatgagtccaacaagatgaagaaagtgtacctgtgcagcggcaacgtgtccaccgaaaataacaccatcgtctccgacacctgtgatgagattactcagaaccacgcccgtcgttcctataacaagaaaggcaagcagacctctatctacgaaaacttctccaagtccgctcaaaatgcgggtaacgcatctggcgttggtaacgtgagcggcaagatcggtaacatcatctacggcgataactttaataactgcgctaacggcaaggacatttgtcaccacttgtacggcaaggaagaagaaggcttcttcgacgtgaatgatgaaaacgccttcggcaacgatgtccttcacttgaaccattacgctatcaagaacccgttgaagaaaggcaccactgaaaccttcatcaagaagacctgcaaccagaagtcctcctggaaggagaaaatcaccgataaataccacggcaccccaaacggcacccgtcgagacaagcacaacgtgttgtcctccaagaagaaggagaacggtcgtaagtgtaaaggcatccaggttaacaacaataataataataacaacgtgatcctgattaactccgaatcttacgaccacgatcaaaaggtcatcgacttggtcgataccccagagaagtccaacaagaactacgagtgtcacgaacatgacggcagagataacgatgacgatgacgatcgtcattccggcggcggctccaattataaccgtgactcctctaataactcccacaacgtggatcgcaagagatacgtcgttggcaccgacaaacactccggctcctccaatacccataacgtgggcaccgataagcactccggcggctccaacacccacaacgtcggtatcgacaaacactccggcggctccaatacccacaacgtgggcattgacaagcattccggcggctccaatactcataacgtgggcaccgacaagcactccggcggctccaacccacacaacgtcggcaccgataagcacagccattcaggctcctccaataacaacaagcgctccctggaacgtaagaagaagcgtaatgagggcaactacatgtcgttgtcctataaggcaaacatctacggacacaaagtggtcttcaaccgcggcaacaataacaatgacgatgccaacgttaaggcttataacgaaaaggacggcaagggcggcgaacgtaacaataactgcaccttctacgataagaatgtgaacggtatgaaccgtgaacgatccctgaaaaacatctcgtacatgtccaacatctctgagattcgtggcatgaataacgtcaataacgttcgtcgtaagaaccgaatcgacgaaggcaagaaccgcaacattaaaggcaccgacgatagcgattacttgctgtccgaagtgaccgcgaacatgtccaagaacatcggcccaatttctgacatctacagcttgaagaagatctccaagttgaaccgaagcgacgatggtaaatatgaaaactctctgagcgattacgtgcctaagttgaagtcctccaacatcgtcatctacaacaaggttaagaaaaacgcattgttgatgggtcgtaagcacatgtcagatggcaagtcccgtaataaccaccatcgcaagaactcccacatgaatcagaagtctaacaaagactacgtttactactccgattcctccaagaagatcaacgaaatcatctacatgaagcgtcaagacggcgatctgaccgaggaaaacgccattgtgaaggaaaacttgaacgaattgaactccaacttgttctactccaatggcaccggcaacaagggcggcgacatcaagggtccagaaaagaactcctccaataactccggcaccttgtctggcaccaataacggaaataactccaactcctccatccagaacttcgcgaatgttaacgagaaggcaggcggtatcacctttaccaccccaaacattgtggccgacgaatactgcgataagaaagagatccctattaagcgtggcaataactccggtgacaataacggattgaactccggcttgaactccggttacaattcgggacacaacggcgtgcataattcctgtaacgattcctccaacaagccaatcattaacgaaggcaccggatacaataacagctatcactcagaccaggatgctaacaagagcaacgaggaaaagtacaaatccaacggcctgatcagacctaataaccttgaacgtaacatcattctcggtaacgaaatcattgtcgagaaggacaataacttgtcttaccgaaacatcagcggccacaacttgaacgaaaccaactcctatgtttacgccaacgatggcaccattgctgagggtcactacggaaataacaatatggcacgtggctccaacattggctgctccgacgacatcgagggctccgaagacattgaaggcggcgaagacatcgaaggcggcgaagacattgagggcggtgaagacatcgaaggcggcgaagacattgaaggcggcgaagacatcgagggcggtgacgatattgaaggctcctataacatccgttcctcctccaacatctacatgggcaactccaacgccatctctgatgtggctcaggtgtccggctccgtgaatgacgcgaacatctccaacttgatgggtcacgttaaggacgaaattggcttttgcggtaaaaacttcttgtactccgaaaacgagctgaagatgaacgcattgctgagagaggaagagaaggataaatccaccatccgtaacttgaacactctgaacaacaactcttacatcaacaacttgatcaccaacgtggatgatgacaccttcatccacaaggaaggcaacttctttctggagtgcacccttaccaactccgaaatgaactgctcctccttcgagatggatatgtccctgaataacatctatccaaacggcggcgaacacgtgaagcagcatcgtaaatacgatgacgatttgaagaaagagttc

SEQ ID NO: 194 - DNA, 1395 bp, Prochlorococcus sp.
atgaaaatctccgatttgctgacttacaagcgcggtaaaaacttgttcctgccagcacacggccgtggcttcgcgctgcctaccgatttgcgtcgtttgctccgcaagcgtccaggcatctgggatctgcctgaattgctggacattggcggtccattgtgctccatcggcgctattgcagtgtcccaggatgagtccgctaaagtgttcggtgcggaccattgttggtatggtgtcaacggagcaaccggccttctccaggcatccttgctggcaatcgccaagccaggtgaagctattctgatgcctcgtaatgcgcaccgatccctgatccaggcatgcgttcttggcgacatcgtcccggttctgtttgatattccctacttgtctgaccgtggccatgcctatccacctgacatcgactggctgaacaaggtccttaagttgacctcttcttgcaagctggacatcactgcagccgttttgatcaacccaacctaccacggctactcctccgaactgtccatccttattaagcgtttgcacaaacagggactcaaggtgttggtcgatgaggcacacggcacctacttcgcgtctgacatcgacaaaggcctgccagtgtccgcacttaaggctggtgcggacttggtggtcaactctctgcacaagagcgcccagggtatcgttcaaaccgctgtgctgtggtcccagggacagttggttgatccatctgtcatctcccgttgcctgggccttctccagaccacctctccatcctccttgctgcttgcatcgtgtgaattggccctgaaagagctgacctctcgatctggcaagagaaacttgtcctcccaaatcgatgacgcgcgtgatgtgttccttcgattgaagaacttgggcctgccgctcttgaagaacgatgatccattgcgtctcgtcttgcactcctcctaccacggcatctgcggattcgatgcagacaaatggtttattaagcacggcatcattggtgaattgccggagcccggcaccctcactttctgcttgggcttcaacccattgaagggccttgcacatgccatgaagaaatgttggtacaaactgttgttggataacacctctccaaagacttatccgcccttcccaggtcctaattttccgttgctgtctcaccccagcatgtcatgctcgctggcataccgttccaactctaacttggtcatgttgaacgaagcagagggccttgtgtccgccgatttggtctgtccatatccacctggtatcccggtgttgatcccaggcgaattgttggatcagcaacgtatcaactggatgctgggccagcacaagttctggccaaatcagattcctttgcaagtccgagttgtgtcc

SEQ ID NO: 195 - DNA, 873 bp, Candidatus Accumulibacter sp.
atgaacctgcgtgatcacgtggcagcccacccattgctgcgtcgtcacttccgtttcttgaccgttactgatttggtgcccgaagagttccgagaatcccaggtcgagtctctgtacaacatcgacaccggttgggcaaacttgttgaaggcctggcgattcgatgaatttgctttggacccatcccgcgctaccctggctatcggccttactggtatggatggcgataccattaagaacaaatacctgatggataagtacgacatccaaattaacaaaacctctcgaaatactgtcttgttcatgaccaacatcggcaccactcgttctaccattgcatacttgctgggcgtgctggtcaagatcgctggcgatgtggatgaacgtgttgcggatatgtctaccccagagcgtcgtatccacgacaaacgtgtgcgttccttgaccttggaattgccaccattgcctaacttctcgtgctttcatcaggcattccgtggccgttccttggatggccgtaccgagacccgtgatggtgacgtgcgttccgcattcttcttgggctacgaagacggtaactgcgagtatttgactatggaagagactgctcaggcaatcaagaacggccgtgaatgtgtttccgcacaattcgtgatcccatacccaccaggctttccaattttggtgcctggccaggtcatctccgcagaaattctgcagttcatgcaagcccttgatgtgcgcgagatccacggcttccgtccagacctgggcttccgtatctacaccgaagctgcgcttgagcaggctggccaagcaaacgccgtctggaaagcgcagatcaacagcaccgcagcccaagttgaatcagag

SEQ ID NO: 196 - DNA, 1422 bp, Bacillus megaterium
atggatacctacttgccactgtataaccgccttgtgtcccactctgaaaagcgttccttgtcataccacgtgccaggccataagaatggccagatcttgccctcccatattcaatcctcttacgcagatttcttgcagtatgacctgaccgagatctctggcttggatgacctgcacgaagccgaatccgtgatcaaggaagcacaagagcttaccgcgaagttgtacggtgtggacgaatccttcttcttggtcaacggttccaccgttggaaacttggcagccatcttgtccttgtgccacgagggcgataaaattgcagtgcagcgtgactcgcataagtccatcttcaacgctattgcgttgtctaaggcatccccgatctttctggcccccgaaattgattccaagacccacttgtccaccggcgtgtccatcaagaccatcaaagctgcgttggagggttctcaggacatcaaggcattcgtcctgaccaacccgacttactatggcgttgcgcgagatttgaaggaaatcattgactttatccacggttacaacattcccatcattatcgatgaggcacacggcgcacacttcatcctgggtaatccgtttccatcctccgcagtcacctacggcgctgacctggtggtccagtcagctcacaaaacccttcctgcgatgactatgggctcctacttgcacatgcagggcaccctgatcaacaagcaatccgttcgtcaccacttgcaggtgctccagtcctcctccccaagctaccctatcatggcatccttggatttggcgcgttactatttgcagcaattcacccagtatgacatcgaccgaatgactgaaaacattcacagctttgtcgaaaagatcaacgagatcgataccttgtccaccatcgatgttgagaccgaccaaaccgccactgacttgctgaagatgaccctgacttgttccgcagccaccggctaccacttgcagaaggaactggagaaacaagacatctacaccgaacttgcagacgttaactatgtgttgttcgtccttccattgtcctcctcctgggattttaacgacaccatcaagcgtgttcgacaggctgtggaaaacatccagcgtaagtcctacgaaaaattgattatcaagccattccgtttctcccgtgcaaccgttcttctcccaatggaagaacgtaaactgcgaaccaagcacatgtgctccttcgaagaggcaatcggacgtgtgtccgcacagtccgtgatcccatacccacctggtattcctatcctgatggaaggagagaccatcacctctaaccacatcgattacatccttcatatccagagactcaatggccacatccaaggcggttcctgtatcgaagagggtaaaattgaagtgttcaag

SEQ ID NO: 197 - DNA, 2139 bp, Escherichia coli
atgaacattatcgcaatcatgggaccgcatggcgtcttttataaggatgaaccgattaaagaactggaatctgcgctggtcgctcaaggattccagattatctggccacaaaattccgtagatctgcttaaattcattgaacataaccctcgcatttgcggcgttatcttcgattgggacgaatattcactggatctgtgtagcgatattaatcaactgaacgaatatctgccgctttacgcctttattaacactcattctacaatggacgtttccgtgcaggatatgcgtatggcattatggtttttcgaatacgccttgggacaagcagaggatattgcgatccgtatgcggcagtatacggacgaatacctggataatattacaccgccgtttacaaaagcactgtttacgtatgttaaggaacggaagtacacgttttgtacaccgggccacatgggcggcacagcttatcaaaaatcacctgtgggctgtttattttacgatttctttggcggaaatacattgaaggctgatgtttcaattagcgtgacggaattaggatcattattggatcatacaggcccgcatctggaagcagaagagtatattgcgagaacttttggggctgagcagagctacatcgttacgaatggcacatcaacatccaacaaaattgtggggatgtatgcagcgccgagtggctcaacactcctgattgacagaaattgccataaatcactggcgcatctgttaatgatgaacgatgttgtgccggtttggctgaaacctacgagaaatgctcttggaattttaggcggaatcccgagacgcgagtttacaagagattctatcgaagagaaagtggctgccacaacgcaagcccagtggcctgtccatgcagtaattacaaattcaacgtatgatggcttgctctacaacacggattggattaaacaaacactggatgtcccgagtatccactttgattcggcgtgggttccgtatacacatttccacccgatctaccagggcaaatctggaatgtccggtgaacgcgtcgccggaaaagtaatttttgagacgcaatcaacacataagatgttggcagcgctcagtcaagcatcactgattcacatcaaaggcgaatatgatgaagaagcgtttaatgaagcgtttatgatgcataccactacatcaccgagctaccctatcgttgccagcgtggaaacagctgccgcaatgctgcgagggaatccgggcaaacgacttattaacaggagtgttgaaagagcactgcattttcggaaagaagttcagcgacttagggaagagtccgacggatggtttttcgatatttggcaaccgccgcaagttgatgaagctgagtgctggccagtggcaccgggcgaacaatggcatggctttaacgatgccgacgcagatcacatgtttcttgatccggtcaaagtaactattttgacaccgggaatggatgaacagggtaatatgtctgaagaaggcattccggcggctcttgtggcgaaatttttagatgaacgcggaattgtcgtagagaaaacaggcccgtataatctgctgtttctgttttcaattggcatcgataaaaccaaggctatgggattattgcgcggtcttacagagtttaaacgtagctatgacttaaatttgagaattaaaaatatgctgccggatctttatgccgaagaccctgatttttaccgtaatatgcggattcaagatctggcacagggcattcataaattgatccgaaagcacgatctgccgggcctcatgctgagggcgtttgatactctgcctgaaatgatcatgacaccgcatcaagcatggcaacgtcagattaaaggtgaagtcgagacgatcgccttagaacagttggtcggcagagtttcagcaaatatgattcttccgtatccgccgggcgttccgctcctgatgccgggagaaatgttaactaaagagtcacgtacagtcctggactttcttttaatgctttgtagcgtagggcaacattatcctggcttcgaaacagatattcatggcgcgaaacaggacgaggatggtgtttacagagttcgcgtgcttaagatggctggc

SEQ ID NO: 198 - DNA, 2238 bp, Methylotenera versatilis
atgaagttccgttttccagtggtcatcattgatgaggacttccgttccgaaaactcctctggtttgggcatccgtatgctggcgaaggcaattgaaaccgagggcttcgaagtcctgggtgttacctcttacggcgatttgacctctttcgtgcagcaacagtcccgtgcatcggctttcatcctgtccattgatgacaacgagtttatcgaaggcaatcgtgatgcattggacaacctgcgaaagttcgtggatgaaatccgttaccgtaacgaagagatccctatcttcttgcacggcgagacccgcacctctcgacacatcccgaatgagattcttcgtgaattgaacggcttcatccacatgtacgaggataccccagaatttgtggcacgttacatcctgcgagaagcgaaggcatatttggattccttgccaccaccattcttcaaagccttgaccgagtacgcagccgacggctcctattcatggcactgccccggtcattccggcggcgtggcattcttgaagtccccagtgggacaaatgtttcaccagttctttggcgaaaatatgctccgtgcagatgtttgcaacgccgtggacgagctgggccagttgctggatcacaccggcccagttgctgcgtccgaacgcaatgcagccagaatctacaactgtgatcacttgtatttcgtgaccaacggcacctctacctctaacaagatggtgtggaactccaccgtcgcaccgggcgatgttgttgtcgttgaccgcaactgtcacaaatcaatcctgcatgcaatcattatgaccggcgccattcccgtcttccttatgccaactcgtaaccactttggaatcattggccctatcccgaagtccgagttcgagtgggaaaatatccaaaagaaaattgatcgcaacccattcatcttggataagacctctaaaccacgtgtgttgaccattactcagtctacctacgatggtgtcctgtataacgttgaagagatcaaggatatgcttgacggcaaaattgataccctccacttcgacgaagcatggttgcctcacgcgaccttccatgatttttacggtgactatcatgcaatcggcgagggtcgtccgcgatgcaaggaatctatggtgttctctacccagtccacccacaaacttctcgcaggcctgagccaggcatcccagatccttgttcaggatgctgaaaacaacaagttggatcgtgacatcttcaacgaggcgtaccttatgcatacctctacctctccacagtattcgatcgttgcttccattgatgtggctgcggcaatgatggaagcaccaggcggcaccgcgttggtggaagaatccttgatggaggctctggacttccgtcgagcgatgcgaaaggtcgatgaagagtggggcaccgactggtggtttaaagtttggggtccagatgacctttcagaagaaggcttggaagaacgtgatgcgtggatgctgaaggcgaacgatgcatggcacgacttcggcaacttggcacccggttttaacatgttggacccaatcaaagccaccatcattaccccaggcttggacatcaagggcaacttctccgacaaatttggcatcccagccgctattgttaccaagtaccttgctgagcacggcgtgatcgtcgaaaagaccggtttgtattccttcttcattatgttcaccatcggtattactaagggccgttggaatactatggtggcgtctctgcaacagttcaaggatgactacgataaaaaccaacctctttggaaagtcctcccggagttcgttcaaaagcagcctcgctatgaaaagatcggtcttagagatttgtgcgagcagattcacgccgtgtaccgcgctaacgacgtcgcgagattgaccactgaaatgtatctgtccgatatggtccccgctatgaagccaaccgacgccttcgctaagatggcgcatcgtaaaatggatcgagtgcctatcgatgacttggaaggccgtattaccgcagtcttgctgaccccatacccaccaggcatcccacttctcattccgggcgagcgtttcaacaaggttatcgtgaattacctgaaattcgcacgtgagttcaacgaaaagttcccaggttttgaagccgataaccacggcttggtgaaggtggtcgttgatggcaaagccacctacttcgtggactgtgtcgaacag

SEQ ID NO: 199 - DNA, 7425 bp, Plasmodium reichenowi
atgaagttctccaatgatccaaactttcagatcgatgaggactctttgcacatgaacaacatccatcaaaacaaaatcgaagaggacgtgattcctgattccaaggccgtgtctgactataacgtcaacaatcaggaagttcagcgtaagtccttgtccttgaaggaagatgagaaaatgcgtatcaactccgtgggcgtctataaggtgaaacgcgaagagtacaagaacaatatgaacccacgtaacgtccaggaaaagaacatcaaccaaatgtacaagcaccataaaaacgtccccaccaaggtttatgacgaaaacatcgagtatcagcgcaaaaactacgaagagaacctttatggcaacaccaagtacgatcgtatcaaggaattggagaactacatcaacatcaacaacgccacctctgtgtgctctctgcgtatcaagttgtgggaggctttgctgctttacgtgaacaacttgaacgtcgagttcatctactttatcatttcctgtcttaaggaaatcgaggtctactggggtcaagaagcaaccgagaaccttcacgaaatcatcaacttgatcaacgacaagaaatacaaggaagtgtccaacaaaatccgtgaaaccctgtcctctctttccgtgaccactggcaagattactgatgagaacccattcttttacaccctgatcgtgtcctccaaacgcaatgaaaaccgttcctcctccaccaacaattattccgatttgacctgcgagttgaacaagattctgcagtacgaacacaaccgtctttctaaccaaatcaacaacaagaccttggaatacaaaatcattgaagtgtccaacgctaaggaagcattgttggcatgcttgattaacccacagatcctgtccgtggtcattgtggacaacttgaacatcgatgaagagtctgtcgaagagaaggacatctacaactattacaacgatgaaaacaactccgttcgtaaccatagcgtggcaaactcctacgtgtacaactcctccattgtcaacaacttgcacatgccaatcaacaagtcctccatgaacaatattgcagttaacgctctggcgcttaacaacaaggacatctacatgaaaggcatgatgggcacctctcgacaccacaacaataataacaacaacaacaagaataataacaacaaaaacaacaataacaacaacaataacaacaataacaataacaacaacaacaacaactccggcgtgatcgacttccgaaagaacaaatcgtacaactactccaacaactaccttaacaacaacaccaacttgaacaagtataacgattccaacaagaaatacatgatcaacaacatgaactacatgaacaacttgaacaagatgtacaacatgaacaacatgtataacatgtataacatgtgtaacatcaactataacaacgacaacatctgtcaccatcagtttaaggagtacaaattcaacatcgcggattttgtcttgggatatgttcaactggtgtccgcaccacttgaaaagatgaagaaaggctttaacagcttggtcatcttgatcaaatcaattgcctacatccgttcctccgtggacatcttctgcgtgtgtacctctatcaccttggatagccttcagtccgtgaacaatatgatcattagaatcttcaccactcacgatgaccattctgatttgcacgagagcatcttggatggcgtcaagaaaaagattaaaaccccgttctttaacgctcttaaggcatacgccgaacgtcccatcggtgtgttccacgctctggcgatttctaagggcaactccgtgcgtcgttcccgttggattcagtccttgttggatttctacggagtcaacctgtttaaggcggaatcctccgcaacctgcggcggtttggactcgttgttggacccacacggctccttgaaggatgcgcaaatcatggcagcccgagcatattcctctaagtactgtttctttgttaccaacggcacctcttcttccaacaaaatcgtcatgcaggcgttggttaagccaggcgacatcattctggtcgatcgcgcatgccacaagtcacaccattacggcttcgttctttcgcaagcgtttccgtgttacttggacccataccccgtttccaagtatggaatctacggcgcagtgcccatctacgtcatcaaaaagaccctgcttgagtatcgcaagtctaacaagttgcacttggtgcgtctcatcattttgaccaactgcactttcgatggcatcgtctacaacgttaaacgcgtgatggaagagtgtttgtccatcaagccagacctgattttcctttttgatgaagcctggttcgcatacgcctgctttcatcctatcctgaaattccgtaccgccatgactgtggctgaaaagatgcgttccaccgagcagaagcgaatctacgaaaagatccacaagaagttgttgaagaagttctccaacgtcaagtccttgaacgatgttccagaagaggaactgcttaagacccgtctgtacccaaatcctaacgaatataaagttcgagtgtacgctactcagtccatccacaagtccttgacctctttgcgccaaggctccgtgatcttgatctccgatgacaacttcgagtcccatgcctataccccattcaaggaagcatactatactcacatgtctacctctcctaactaccagatcctggcgacccttgatgccggccgtgctcaaatggaactggagggttacggcttggtggaaaaacagaccgaggctgcattcttgatccgtaaggaattgagcgaggacccaatcatctcaaagtacttccgtatcttgaacgcagatgaccttatccctgatcgtctccgacaatgcaccgtctcctatatgaagcgtaaacacgtgaacaacaacaacaacaaaaagaaaaagaacgatgacgataacaacaacgatggcgacgataacaataacgacgataataacgacggtgacgataataacaatgacgataacaatgatggcgatgacaacaacaacgatgacgacaacaacaacgacgatgataacaacaacgatggtgacgacaacaacaatgacgatgacaacaataacgatgacgatattaaccacaactctaaccataattccaacaacaactcaaacatcaacaacaacgtgggcaaccagaaaaagtacaataactcgttgaactgccgttgttccggcgatgaaaactctaccggctcctacatcttcaacaacaacattaaggaaatcgaggacaacaccgagtccgcccataagattccgatcgaatacgtggatggcaagttgttcaacgtcattaaatatccccacgaatacatgtcggaggataactccccgaacaatatccccaccaacctgcagaagtccaacatgaaacttatcaactataacaacatcgaggtcggccgtatcttggaatcctctaactgctttaagtattctcacaatgtgaacatgagcaacgtcctgatcaacaactcctcctacaaaaacaattccgacaacaaaaaggatggtttcgagaagcgttatgtgtgcaacgaatacaacgagcgagtcaaagaaaactgtccaaacgacgatactaactacgatgctacctataagggctacgtgaacgaagacgtcaatgttaacatgaatggccacgtgaacgtcaatatgaacggtcatgttaatgtgaacatgaatggacacgtcaacgttaatatgtcggacctgatgaacggcgataacaagtctgattggtgcgacaccaacgattgtgacgataacaagaatatctactgcgataaagccaacaacatctactactacggtaacaactacaagtccaaagaggaaaagcgtaaaaaggctaactatggctccgtgaactccatctgctgcgactctacttactgtatggatacctctgacgataacttctcctccaacgaatactcctcctacatcgacaacaatcaccacaataacaacaacaataataataataacaataataacaacaatatcaacaatatcaacaataacaattccaactctaacaataacagctgctcaggcgatatgaagaactttttggaatacttcgagcgctcctggctctctgaagacgagttcgtgttggacccaaccagaattaccttgttcaccggttattccggaatcgatggcgacaccttcaaggtgaaatggttgatggataaatacggcattcagatcaacaagacctctatcaactcagtcctgtttcaaaccaacatcggcaccactggctcctcctgcttgttcttgaagtcctgtttgtccttgatctcccaggaattggatcagaagaagtccttgttcaacgagcgtgaccttaaccagtttaacgaatccgtttacaaccttgtgtataactacatcgatttgtccgtgttctccgcatttcacccgctgttcaaaaagcgttacgaggacaaaaacatcttcaacaacgaaggcgatttgcgtaaggcgttctatttggcatacgaggaaaactatgttgagtacatcctcttgaacgacttgaaggatcgtatccgtcacaaagaaatgatcgtggcagcctccttcatcattccctacccacctggttttccagtgttggtgccaggccagatcatttctgaggaaatcgttaactacttgtcgggcttgtccgtgaaggagatccacggctacgatgaaaacatcggcttccgttgcttctacaacttcatcttggactactacgaaaccattaacatcaatgatccatattccatgtaccagcctatggacaagaccctttacgaacaactcaaggagaaatacttgcactccaaaaaggaccttcacgatcatcgactgtctaacctttacatgtacgataaggaaaccaaaaagatgaaaaaggtctacattcacaacaacaacggctcctattccgtggacccatacggctccatctccgatctgaacgaggaagagggtgttatcattaacgcgcagctggtgaacaacaagaaggatattttccttcgtaacaagcgagaaaacaaaattcacaataataataataacaacaacaaaaagaaaacccacgtgaataacaagtccgatgtcatgatcattatcccgtctggcgaccacttgaacccacacatcacccataagatgaacgacaataaccgtaagattatcaacaccaagaactacaacaacattatcaactacacctctaacatcctgaataacaagcaggatcacgcattctacaactcaggctccccacgtacctctgtgtgcagcaaccctaagaacatgaataccaacgatatgtgtaataacttgatgcacaaaaacgacgagcgaggcaataacaagagcatgctgaagcacgaaaagaacaaccattcactgtaccttactaacggcttgaacaccaagtcccacaagaaaatgtatatcgagtcatacaaccctaagggtgaccgtgaactggatttccagaacaaatccaccatgtgcaaccacatggacgatgttgcgtaccacggcaagcactaccattctgtgaagaaagacatcatcaacaacgatacctctttgaaggagaacacttataacaagaacatcatgtcctgcaagaccaataacaataccggcaccaactccaagaacgagcgtaagaagaagaagtccttgggcatccacatgtcgttggcaccaaatattaaccacctgaagggtcatgacacctctcgatactccgattctacctctatctgcgaggacaatatcaacgatgaaaacgttgacgataccggacataagaaaattgaccctatcgatggccacaacatccgaaacaagaaattcgatattaaggaaatccattataacaacaacaatgacatctatggcaacccgtgcgatgtgattccctgtaaagagaacatgtacatcaacgaaaaggactcatattcggatgttgtgttgattaagcgcaacaacaagatcaacaagagcgatggtaactaccataacaacaactcaaacaactcctctaacaacaactcaaagcactcgaacgtcgttccgattctgaacaaaggcaacatcctgcttaacaataccaacgttaagaacgactactgcgtgattcagaaggataacaaaatcatgtcccgtaacaatatgaacaccaaatatgcatcctccatcgagtacaagaacaagaaggaaggcggcgcatattactccgattcctccaagaacatccacgataacttgttcttgaagcgcaaagaaaatgagaacgtccaatacatcaccaagaaagatgttatgaagagagaaccgttgatcggttacaacaaggaagagattaagaaaatcaacgagttcctgaagattaaccgtcgtatcgccgacgaacccattggcgatacccagatcaaattggacgaagagattctggagcgtaaggaagaggacatctacgataacaacaagaacgatatgttcaacgctaacattaagaacaacatcgaagacgttgccgataactccgctcaaatgaacatcgacaagaaagatattatcgtgttgcctagcaacaataactactgcgacatcaacaacaactcctgtaactacgtcaagaaatgcgaaactaacaaatgtgacatctacatcaccaaggataacctggaagagattcagaagaccaatatgaacatcaagaaagacgttgaacacgatattgcggagtacaacttcgactccgttatcaaccaatctgtgaataacaacattaacatcttgttggataagtacaactgcaacaacattaagaaattgaataactccaacatctacgagaataacaacttgttgtccaacgataacaattactctgtcaaccacaaggtttacaactccatcgaaaacatcaacactttgaactgcgataacatcaagaccgataataataacaacaataacaacaatatgtcctacaaggagtacaaagtgcgtggcctgattatctgtgaaaacgacatcaacaagaacactggccgtcagctcaacaccttgaacaacaactcctacatcaacaacttgatcactaacgtggatgatgacacctttgttcaccgtgagggtaacttctttctgcaatgcgagttcgcaaactctgacatcaattgtaacatgtacgaaatggagacctctttgaataacatgtgcaccaacccaggcgaagtgatcatcaagaacaacatggaatacaacgattgtgagaccaagcacaaa

SEQ ID NO: 200 - DNA, 1452 bp, Streptococcus australis
atgctgaaccagaatcaagccccgatctacgaaggcctggtcaagttgcgtaagaaacgaatcgtgccgttcgatgtccccggtcacaaacgtggccgtggtaaccccgaattggttgagttgctgggtgaaaagtgcgttggaatcgatgtgaactccatgaaaccattggataacttgggccaccctatctccatcattcgtgacgccgaagaattggcagccgaggctttcggtgctgcgcatgcgtttttgatgatcggcggcaccacctcttctgtgcaaaccatgatcttgtccacctgcaaggctggcgataaaatcattcttccacgtaacgttcacaagagcgcaatcaacgcgctggtgctttgtggtgcgatcccgatctacatcgaaatgtccgtggaccccaagattggcatcgcactcggtttggaaaacgagcgtgtcgctcaggcgatcaaggatcatccagacgcaaaagccattctgatcaacaatcctacttactatggcatctgctccgatctgaagggccttaccgaaatggcgcacgcagccggaatgaaagtgttggtggatgaggcacacggcgcacacttgcactttaccgacaagctgcctctttctgcgatggatgctggcgcggacatgtcggcagtgtccatgcacaagtccggcggctccttgacccagtcctccttgttgttggtgggcgatcaaatgaacccagaatacgttcgacagatcatcaacttgacccagtctacctctgcctcatatctgcttatgtcctccttggacatctcccgtcgtaacttggctttgcgtggcaaggaatccttcgagaaagtgatcgaactgtctgagtacgcacgtcgtgaaattaacgccatcggcggctactatgcttatagcaaggagttggtcgatggcgtgtccgtgttcgattttgacgtcaccaaactgtccgtttacactcagggaattggccttaccggcatcgaagtgtacgatttgttgcgtgatgaatatgacattcaaatcgagtttggtgacattggaaacatcctggcatacatttctatcggcgatcgtattcaggacatcgagcgtttggtgggcgcattggccgacatcaagcgcctgtactcccgtgatggcaaggaccttattgccggcgaatatatccagccggagctggtcctttccccacaggaagcattctactcagagcgtcgttccttgaccttggacgaatccgtcggacaggtttgcggcgagtttgttatgtgttacccacctggcattccaatcctcgcgcctggtgaacgcattacccagggcttggtggattatatcaagttcgcaaaagagcgtggctgctccttgcaaggcaccgaagacccagaggtgaaccacattaatgtcatcgagcgtaaggagaac

SEQ ID NO: 201 - DNA, 2253 bp, Marinobacterium sp.
atgaagttccgttttccagtggtcatcattgatgaagacttccgctccgagaacatttcgggttccggcatccgtgatctggcggaagcaatcggcaaggaaggcatggaagtggtgggcttcacctcttacggcgatttgacctctttcgcacagcaggcatcccgtgcatcatgcttcattttgtccatcgatgacgaagagtttggctctggctccgatgaagacgtttctatcgcgctgaaggcaattcgtgatttcatcaccgaggtgcgcaaaagaaacaatgacattccgatctttttgtacggcgaaacccgcacctctcgacacattagcaacgacatcttgcgcgagctgcacggtttcatccacatgtttgaagacaccccagagttcgtggcgagacacatcattcgtgaagcacgaaagtatcttgattgcctcgccccacctttctttcgtgccctgatggattacgctagcgactcctcttattcatggcactgtccaggccattctggcggtgtcgcattcttgaagtcccctgttggacagatgtttcaccaattctttggtgaaaacatgctgcgtgcggatgtctgcaatgcagttgacgagcttggccagttgctggatcacaccggcccagtgtccgcctcggaagctaacgcagcccgtatcttcaacgcggaccacttgttctttgtgaccaacggcacctctacctctaacaaggtcgtttggcattccaccgtcgcaccaggcgacatcgttgtcgttgaccgtaactgtcacaagtcaatcttgcattcgatcatcatgaccggcgcgatcccggttttcctgatgcccacccgaaaccactacggtatcattggcccaatccccaagtccgagttcgatccagagaccattcgcaagaaaatcgaagccaacccgtttgcgcgcaaggcaaagaacaagaagccccgtatcttgaccatcactcagtctacctacgatggcattttgtataacgtcgaaaccatcaagagcatgttgggtaataccatcgatactctgcacttcgacgaggcatggcttccacacgctgcgttccatcctttttaccgtaacatgcatgccatcggagaaggccgtccgcgatctgatgagaccctggtctttgctacccagtccacccacaagttgctcgccggcctctcgcaggcttcccaaatcttggttcaagatggcaccaaccgtaagttggacactcaccgtttcaacgaatcatacttgatgcactcttccacctctccacagtatgccatcattgcttcctgcgatgtcgcagccgctatgatggaaccaccaggcggcaaggcattggtggaagagtcccttcacgaagcattggatttccgtcgagcgatgcataaagcagacgaagagttcggcaaggatgactggtggtttaaagtgtggggtccactgcctcaatccgaagagggtgtgggcgatcgtgatgactgggtcatccacgaagatgacacctggcatggcttcggtcgaattgagtcaggctttaacatgttggacccaatcaagtccaccatcattaccccaggccttaacttgaatggagagttcgatgaggacggcattccagcggcaatcgtgtccaagtacttggcagaacacggaatcattatcgagaaaaccggcctttattccttcttcatcatgttcaccattggcatcactaagggccgctggaacagcatggtgaccgaactgcagcaattcaaagatgactacgatcacaaccttccgatgtggcgtgtgatgcccgaatttgccgctaagcacccacagtatgagcgcattggcttgagagacctgtgttccgccatccactctgtttacaaagaatataacgtggctcgtattaccactgatatgtacctgtctaatatcgaaccagctatgaccccagctgatgcttgggcgaagatggcacaccgtgatgttgagcgagtgtccattgacgaactggagggccgtgtgaccgcaatgcttgtcaccccatacccacctggtatcccattgttggtgccaggcgaacgattcaacgcgaccattatctcatatctgaagttcgcacgcgattttaactcccgtttccctggctttgagaccgacgtgcacggtttggtccgtgaatccgttgatggcgaggaccgatacttcgtcgatgtggtcaaagac

SEQ ID NO: 202 - DNA, 1512 bp, Bacteroides pectinophilus
atgttgcctaccaactccggccagaagaccttcgataatgaggatgacttgtttgaccgcctggaaaactactgctcctctggatatatcccgatgcacatgccaggccataagcgtaacacccaactgatcgatactggcaatccatacggtatcgacattaccgaaattgatggtttcgacaacttgcaccatcctgatggcttcttgaaggaagcccaggagcgtgcagcccaatactatgacgctgcgaaaacctggtacttggtgtccggctcctccatcggccttatgtcggcaattttgggcgtgacctctcgacacgatactgttttggtggcccgaaactgccatatctccgtgtacaatgctatctacgaaaacgagctgaacccacagtacatctatcccaagttcgtggataacctttggatctcctccggcatcttgtccaatgacgtcgagaaggccctgaaaaactgtgtgaagaacgaaaaaggctccggcaaggtcggcgctgttatcattacctctccaacctacgaaggcaacgtgtccgacatccgtgctattgcggacgtggtccacaagtacggcgtgccgttgatcgtcgatgaggcacacggcgcacacttcaagtatagcgaaaaatttccccagtcagctttgggactgggcgcggacgttgtggtccagtctctgcacaagaccttgccatccttgacccaaactgcattgctgcacgttggccgagaggccgtgaacaagaaacgccttatcgctgatattgaccgttacttgaacatgttccagtctacctctccttcctatatcctgatgggctctatcaacagatgcattcgtcttatgaactccgagcgtggccgtgcagtgatggataactacaccaaggaacttgagaagttgcgtcgtcgtttggaaaagctgcgtgtgatcaagttggcaaaatccgatgacatctctaagttggtcatctacaccgaggatggttgcttgcagggcaagcaactgtacgacatccttctcaaacgttaccgtatccagcttgagatggcatccttgcgttacgtgatcgcgatgaccggcccaggcgatactaaggaatactatgatcgcttctacgacgcgttgtgtgagatcgataaagaactggcaggccgttccggcacctctgacatcggctcctccgaaactgttaacatctctcgacccgtgattaagatgaacttgtacgatgcagtgaattgcgaagacaaagagtccgtcgaatatcacgatgcatgcggtcgtgtctctgcatccaccgtttgtatctacccacctggcattccactggtgtgtcctggtgaagtcatcaaccgtaatatgattgataccgttgacaacgcgtttcgagatggcttggacgtgatgggcttggaaggcttggaagcaggtttgtgcggagcagcaccagatgagagaaagatcgtgaaaattctttgtctcaga

SEQ ID NO: 203 - DNA, 2259 bp, Rhizobium etli
atggaatttcaaatggcgtttccgattgctgttatcgatgaagactttgatggaaaatcagcagcgggacgtggtatgcgggacttagcagatgcgattgaaaaagaaggctttagaatcgtctctggagtatcctatgaagatgccagacgcttagtccatatctttaacacagaatcttgctggctggtttcagttgatggagcagaagataaaacaacgagatggcaactgcttggtgaagtactggctgccaaaagacagcgcaacgaccgcctgcctatttttctttttggcgatgacacaacggcggaagatgtcccggcagcggtattacgtcatgctaatgcatttttccggttgtttgaagatacagctgaatttatggcacgcgcgattgctcaagctgccagaaactatctggaccgccttccgcctccgatgtttaaagccttaatggattatacgttggaaggcgcatactcttggcatacaccgggacatggcggcggcgttgcgtttcgtaaatctcctgttggtcagctgttttacacatttttcggcgaaaatacacttcggagcgacatttcagttagcgtgggctcaatcggctcactgctggatcatgtcggtccgattgccgaaggcgaaagaaacgcagcgcgcatctttggaacagatgaaacgctttttgttgtgggcggaacatctacggcaaataaaattgtctggcatggcatggtaggcagaggcgatctggttctttgcgatcgcaactgtcataaatctatcttgcattccttgatcatgacaggagcgacgcctatttatctgatcccgtcacgtaatggtcttggcattatcggccctatttcaaaagatcaatttacgccggaaagcattgctcataaaatcgctgcctctccgtttgcagcgcagacatccggcaaagttcggctgatggtgattacaaattcaacgtatgacggactttgctacaacgtggatgccatcaaagcatcactgggcgacgcggtcgaagtattgcattttgatgaagcatggtacgcctacgcaaactttcatgaattttacgatggttttcatggcatttcaagcaatcaaccggctagatctcagaacgccatcacatttgcaacgcattccacacataaactgcttgctgccctttctcaagcctccatgattcatgtccagcatgcagaaacgaaaagactggatattacacggtttaacgaagcatttatgatgcatacatctacgtcccctcaatatggaattatcgccagctgtgatgttgcagcggctatgatggaacaaccggcaggcagatctttagtgcaggaaacaattgatgaagcgatctcatttcgtcgggctatgaatcgcgttaaaaaacaagcggaaggatcttggtggtttgatgtttgggaacctacagtggccgaacagacgccgtcagacacacatgcagattgggtgttaaaaccgggagacgcgtggcatggatttacgggtttggctgaaaaccatgttatggttgatccgattaaagttacaatcttatcaccgggattgtcagcgagcggtgctatggatgaacatggcattccggccgcagtgatcacgaaatttctgtcttccagacgcattgaaatcgaaaaaacaggcctttactcatttttagtcttgtttagcatgggcattacgcgcggaaaatggagcacgctggtaacagaacttatcaactttaaagacctgtacgatgcgaacgctcctcttacacgtgccctgccggcacttgcggctgcccatcctcaagcctacgcaggagttggtttacgggatttgtgcgaaaaaattcatgcgatctatcgtaaagatgacgtcccgaaagctcagcgggaaatgtacacagtactgcctgaaatggcccttcgtccggcggacgcttatgatagactggttaaatcacgcattgaaagcgtggaaatcgatgaattaatgaacagaattttggcggttatgatcgtgccgtatccgccgggcattccgcttatcatgccgggtgaacgcattacgcaatcaacaaaaagcatccaggactatttattgtacgcacgtgactttgatcggaaatttcctggatttgaaacagatattcatggtttaagatttgcaccgggcgatggtggccgtcggtatctggtggattgtattgctggcgaagaacaggaa

SEQ ID NO: 204 - DNA, 2340 bp, Pseudogulbenkiania ferrooxidans
atgcgtaccgccgtgcttagcgctctctacccatccgtgccagtgaccttccgttacgctgtttatgaagacactggcatgcgtttccactttccaatcgtgatcattgatgaagactttcgatccgagaacacctctggttctggcatccgtgaattggcagccgctatggaaaaggaaggcatggaagtggtcggttacacctcttacggcgatttgacctctttcgcgcagcaacagtctcgtgcggcaggcttcatcctgagcattgatgacgaagagtttggctccggcaccccagaagaggccttggatgcactggccaaccttcgaaatttcgtcgctgaaatccgtcgtcgtaacccagacattcctttgtacctgtatggtgaaaccagaactgcacgtcacatcccaaatgatattctccgtgaattgcacggcttcatccacatgcatgaagacacccctgagtttgttgccagacacatcattcgtgaagctaaatcctacctggatacccttgcaccacctttctttcgtgcgttggtgcactacgcacatgacggctcctattcatggcactgcccaggccattccggcggcgtggccttcctgaagtcccctgtcggtcagatgtttcaccaattctttggagaaaacatgctccgtgccgatgtctgtaatgctgttgacgagcttggacagttgctggaccataccggcccagtggccgcttctgaacgaaacgcggcacgcatcttctccgcagatcacttgttctttgtcaccaacggcacctctacctctaacaagatcgtttggcatagcaccgtggccgctggcgatattgtccttgttgaccgcaactgccacaagtcaaacttgcacgccatcatgatgaccggtgctattccagtgttcctgatgcctacccgtaaccactacggtatcattggcccaatccctaaatccgagttccagcttgataacatcaagaaaaagattctcgcgaatccatttgcacgtgaagcattggaaaagaacccaggcgcaaagccccgtatcctgaccattactcagtccacctacgatggtatcctttataacgtcgaagagattaagtcgatgctcgatggcgaagttgacaccttgcacttcgatgaggcgtggctgccacacgcatctttccatgatttttacggtgacttccatgcaatcggagaaggccgacctcgctgtaaagattccatgatcttctccacccagtccacccacaagttgctcgccggcatctcccaggcatcccagattttggtccaagatccacagaaccgtcaactggacaccgcgtggttcaatgaagcatacttgatgcacacctctacctctccacagtatgcgatcattgcatcctgcgacgttgcggcagccatgatggaacagccaggcggccaagccctggtcgaagagtccctggttgaggcgcttgatttccgtcgtgcaatgcgtaaagtggatgaagagtacggccacgactggtggtttaaggtctggggtccaaacgaattgagcgatgacggtatctgtgatccagccgactgggaactggagcctgatgagcgttggcacggcttcgctggtatcgaagagggttttaacttgctggacccgatcaaggcgaccattctcaccccaggcttggatgtggatggttccttcgaagagatgggcatccccgctgcgattgttaccaaatacttgactgaacacggtgttgtggtcgagaagaccggactgtattctttctttatcatgttcaccatcggaattactaagggccgttggaacaccttgatctccttgctccaacagttcaaagatgactttgataagaatcagccgatgtggcgaatcatgcccgagttcgttgctaaatacccacaatatgaaagagtgggcctccgtgagttgtgccagcgaatccaccaattgtactccaagcatgacatcgcgcgcctgaccactgagatctacttgtctgaaatggagccagcgatgcgacctgctgatgcgttcgcaaagatggcacaccgagaaatcgagcgcgtgccggtcgaagaattggaaggccgcgttacctctgtgctgttgaccccatacccgcccggcatcccgcttctcattcccggtgaacgattcaaccgcaccatcgtggattacttgcgtttcgcacaggagttcaacggtgaattgccaggctttgaaaccgacgtgcacggcttggtggcaatggaaaagaacggcaaaaaggtctactgcgttgattgtgtgaagcag

SEQ ID NO: 205 - DNA, 1506 bp, Roseburia intestinalis
atgcgctaccttgatcaggcattggaagcatacggcaagtccgacgtgtatcccttccacatgccaggtcataaaagaaacccattgccctttccagaagtctacggtatcgatattaccgagatcgatggattcgacaacctgcaccatgctgaaggtattcttaaggaagcacagcaacgtgcagccgatttgtacggctccgctcactgctactatcttgtgaatggctccacctgcggtattttggcgtccatctgcgctgcggtcaagaaacgtggccgaatcttggttgctcgaaactcccacaaggcagcctaccatgcgctgttcctttctgaattgaccgctgagtacttgtatcctgcggtcactgaatgtggtattcagggacaaatcaccccgcgtcaggttgaagatgcactgaagaaagaccccgagacctctgccgtggtcatcacctctccaacctacgaaggcgtgatctccgatattgagggtatcgctaaggttgcgcacgtgcacggcatcccactgatcgtggactctgcacacggcgcacacttgggcttcggcggtgagtttcctcagaatgcagttcgcctgggtgctgatgcagtgatcgaatccttgcacaaaaccctgccatctttcacccaaactgccttgctgcacttgaactccgatttgatctccaagttgagaatcgaaaaatacttgggcatctacgagacctcttctccatcctacatcctgatggcaggaatggaagtgtgcattcgtaccgtcaaggaacacggcgccgagctgttcgataactaccgacatgaacttaacaagttctacaagaactgtgaggatttgaaacgtctgcacgtgatgaccggcaaggacttgtcaaaagaagaggcattcgcctgggatgactcgaagatcgtcatttttgttcgagattcctccaagtccggtgaatggttgtaccaggagcttctcttgaagtatcacttgcagttggaaatggcttcgggcgattacgctctggcgatgacctctatcatggaccaggaagagggttatcaacgcctgtccgctgcgcttcacgaaatcgatagagagctgtgcggagctggcaccgcgaagaaacagcaagccatgaacgaaaagaaagtccgttacggtaatgagaccgacggctctatggaaaacatgtatgagcagcaagtgcaccgtggctccttcatccaggaagtctaccgacctaacccggctcagatgcaaatctacgaggcagaagagaaggaaaccgccgaggtttcttttgatgaagcagccggtcgtgtgtccgcggacttcatcttcttgtacccaccaggcatcccattgatcgtgccaggcgaggcaattactgccgagttcatcgagcgcttgagaacctgcatctccttgaagttgaacttgcagggctccaccgatttgttcgcagaacgtatcaaaattgtttacttt

SEQ ID NO: 206 - DNA, 1506 bp, Roseburia intestinalis
atgaagtcccgcgcctgccgtttcttgtggaaaccacgtggcatctttcttgtgatggataaggaacagcaaatgcgtgcaccagtctacgaagcattggaaaaattgaagaaacgtcgagtggtcccgttcgatgtgcccggccacaagcgtggccgtggcaacccggaactggtcgagttgctgggtgaaaagtgcgtctctttggatgtgaactccatgaaaccgctggacaacttgtgtcacccagtgtccgtgatcaaggaagcagaagaattggcagccgaagcatttcgtgccgagcatgctttctttatggtgggcggcaccacctcttctgtgcagggcatggtcctgtcctgctgtaaggctggcgataaaatcattttgcctcgtaacgttcacaagtccgtgatcaacgcgctggtgctttgcggcgcaattccggtctacgttaaccccgaagtggacgtcaagctgggcatctccttgggcatgcaggtgtccgaagtggagcgtgcaatcttggaaaacccagatgctgttgcggtgcttgtcaacaatcctacctactatggcatctgctccgacctgcgttcaattgttcgagtggcgcacgaacaccacatgctcgtcttggttgatgaggcacacggcacccacttgtacttcggcgaaaaccttccagtctgtgcaatggatgcaggtgccgacatggcatccgtgtccatgcataagtccggcggctccttgacccagtcctccttgctcttgactggcaagggcgtgaactgggaatacgtttctcagatcatcaacttgacccaaaccacctctgcgtcgtatctgcttatgtcctccttggacatctcccgtcgtaacctggcacttcgtggcaaggaatccttcgcgaaagtggcacaaatggccgaatacgcacgtgatgagatcaactccatcggcggcttctacgcatacggcaaggacatggtgaatggcggttccgtctacgattttgacgttaccaaattgtctgtgtatacccgtgacatcggcctggcaggtattgaagtgtacgatttgttgcgcgatgaatatgacatccagattgaattgggcgacatcgcgaacattttggcatacatctccattggcgatcgtatccaagacattgaacgtttggtgggcgcattggcggacatcaagcgtctttacagcaaggacccggcgaaaatgttgaacaccgagtatatcaatccaaaggtgctggtctcccctcaggttgccttctactcgcaaaaagaatccatgcccgtgcgcgagaccgctggtcgtatctgcggagaatttgttatgtgttatccacctggtatcccaattttggcaccaggcgagatgatcaccccagaaatcattgagtacattgtgtatgctaaggaaaaaggctgctccatgcagggcaccgaagatccagaagtggagaacttgaatgttttggcaaagaaa

SEQ ID NO: 207 - DNA, 1428 bp, Carnobacterium inhibens
atggatagaaagaaagttgattcagaacaacatagacgcccgctgtttgatggccttaaccagcataaaaagaaagaaaaagtcagctttcatgtacctggtcataaaaatggcatgaactgggatgaaacatggtcatcatttcaatccgcactgtcatttgaccagacagaagttacgggtctggattatcttcatgacccggaaggcattcttaaagaatcccaagaactgctttcaaaattttacggtagcaaaaaatcttactacctgatcaacggatctacagtgggtaaccttgctatgatcatgggcgccacgaataaaggagatcaagtttttgtggaccgtggatgccatcagtcagttattcatgcactggaacttgcggaactgcaaccggtgtttcttacacctgattgggcagaaatggaccaggcgccgctgggcgtcaacatcaaaaaccttaaagaagcctttgaacattatcctgctgtcaaagcccttatcgtaacatatccgacgtacgatggaatggtataccctatcgaagaattaatcgaatacgcccgtgaacggaaatgtttagtcttggtagatgaagcacatggaccgcatctgacacttggtgacccgtttccttcttccgcattagatttgggagctgacgccgttgtgcaatccgcacataaaatgttaccgtcattgacacaaacggcgtatttacatattggtaatcagtcaagcgatgctttgaaaaacaaaatcgaacattatttgcatatctttcagtcttcctcaccgtcctaccctttaatggtttcattggaatatgctcgttactttcttgccgattttacaaagaaagatctgatcgcgacgcttaaataccgggatttatggaaaaaacaatttaagaaagcaggcctgacaatttttcagagcgatgacccgttaaaagttaaagtgagcttgatcaaccaatctggtgaagaattagcgggccaattggaagaacagggcgtctttggagaaaaaacagatggaacgtctgtattattgacgtttccgttactgaagaaagaaacaaaaatcacggaactgtttagcatccatatcacacagtctgttaaaaacgaagttccgaagaaaatgaaaacgccgttattgattgctccttttgtcgaactggatcttagctatgaaagacaaacaagctctacgaataaacagatctctcttgcagaagcggaaggcaaaattgcagcgagaaacatcacaccgtatccgcctggcattcctttagttttgaaaggagaacgcatcaaagtggaacaaatcaaacagatcaaccattacttagatcaaaacatgcgcgttacgggattggaaaatcagaaagaagtcgttttcttttcagaaaacgac

SEQ ID NO: 208 - DNA, 6747 bp, Plasmodium ovale
atgaacaccgccaatgacgctatgttttactccgctaacaatttcgtctatgcggttaacttttccgagaacaatccagagaaggaaaccaaatctatgaacgagggtaatgattgcatcccttcctctaacgcactgagcgaagaattgggctccgtggcagaacgtgatgaggtcgccagcaacgattccatctgccgtaaccgaaatgtgtcccgtaacggcaatgcaaactccaatatcattaccaacctgtccaagaaccagtctgcgatccagtcctccatcaacagcgctatccactcagcgattcactcctccatccagaactccattcagtcctccatccagaacgtgattccatctacctctcgtcaccattacaaggatgccaaagacttgtcccaaaagtggaagaaagaagagtcgtatcagatcggctcccgtcgtcgtgaaaagaaccgattgaagtcctccaaatacgagaagattaacgtgcttgaacgctatatcaacatttccaatgctaccaacgtctgctctctccgtatcaagttgtgggaagcattgatgttgtacgtgaacaaactgcacttggagttcgtctattttatcctcaactgtttggaagagattgaagtgtactggggtgaagaggctaccaacaacttgcaggacatcctcaacttggttaacgataagaaatacaaggacgtgttgtacaagatcggcgaaattctgtcctctctttccgtgaccacctctaagtctaccgaagagaacccgttcttttacaccctgatcgtctccgcgaagcgtgacgaaaacaacaacaacaacaactacaactcggatctgtcctgcgagcttagcaagatcattcaatatgaacacaaccgattgtccaatcagaacaacaacaagaaactggaatacaagatcatcgaggtgtccaacgcgaaagaggcattgctggcctgcctgatcaactcgcagattttgtccgtggtcttggtcgataacctggttatcgacgaagagttcaccaaggaaaaggattacttcccttacatcgatgacaacgcactgaacaacaattgcgtcaacaattcctacttgttgaactgtaataccaccaactccactcagatcaagaccccgctgagccacaacattggcaacaatggcggttcccccggtaacaaggacaccgtgcgtggctccttgtcctcctgccgtcacaatatctccaacggccaaatgtgcaaccacggccagatgtgtaaccacgagcactcccgttcctccggctccgaatcgaagcgacagtcctccttcttgctgaaacgcgattacaagtttgagatcggtgacttcgttctgggatatgatcagcttgtggcagcaccattggaaaagatgaagaaaggctacaacagcttggtcatcttgattaagtcaatcgcatatattcgttcctccgtggacatcttctgcgtttgtacctctattaccttggataagttgcagtctgttaacaacaagatcattcgcatcttcaccactcacgatgaccattctgacttgcacgagagcatcctggatggcgtgaagaaaaagattaagaccccattctttaacgctctgaaatcctacgcggaacgacctatcggagtcttccatgctttggcgatttctaagggcaactccgtgcgtcgttcccgttggattcagtccttgttggatttctacggtgttaacttgtttaaggcagagtcctctgccacctgcggcggcttggattcgttgttggacccacacggctccttgaaagaagcacagatcatggctgcgcgtgcctacggttccaagtattgtttctttgtgaccaacggcacctcttcttccaacaagattgtgatgcaagcactggtcaaaccaggcgacatcattcttgttgaccgtgcctgccacaagtcccaccattacggcttcgtgctttgccaggcattgccatgttacttggacccgtatcccgtgtcccgttacggtatctatggagccgtgcctatctacgtcattaaaaagaccttgttggaatatcgaaactccaacaagttgcaccttgtcaaattgctgatcctgaccaactgcactttcgatggcattgtgtacaacgtcaagcgtgttgtggaagagtgtttggctatcaaaccggatttgattttcttgtttgatgaggcgtggtttgcatacgcctgcttccaccccatcctgaagttccgtaccgctatggcggtggcagataaaatgcgttccaaggaacagaaaaaggtctactataaaatccacaagcgtcttttgaagaagttcggcaacgtgaactccctgcatgatgttccagtggactacttgctgaagaccagactttatccaaacccttctgaatacaaagtccgtgtttatgcaactcaaagcatccacaagtctctgacctctttgcgtcagggctccatcattttgatctccgatgacaacttcgagtcccacgcttacaccccgtttaaggaagcgtactatactcacatgtctacctctcccaactaccaaatcttggcaaccttggacgctggccgtgcgcagatggagcttgaaggatacggcttggtggaaaagcaagtggaggcagcctttttgatccgaaaagaactgagcgaagatccaatgatctcccgttacttccgtatcttgaacgcagaggatttgatccccgactccttgagacagtgcgccgtctcttacatgaagcgtaagaacaaaatctactccaaggaaggctccccatccttgtcgaaatgctctgacaacgttacctactcatgtatctcgaacaatattgcaaagcgagccactgatcagtccgagaacaccaaataccgcatctgccacaaaaagcccaacttctcctcttgtgaaggcgttcatgaagtcgttgagtccgcaactggtttgggcgtgaccttctccaacgattctcacatcagcaacggttttgtgtcctccggctccggccgttacgaatcttgcaatccagcccgtggcaaccgcctgagagaaggccaccttcgtgagggtcgatttcaagaaaatcatttcagcggtaacgaccctcagatgtcccgtgtgaccgatggcaaaaagaaaaagaaaaagcgtaacgacatctcctccgtgactcacgatgacgataactcaaatgattcgaccaactccgagaacgaatgcttctcgattgaagagtcccgtgaaaacaagaatggcaactgctcctgtaactcctccaactacctgaacaacttcttggaatatttcgagtgttcttggcttagcgaggatgagttcgtgttggacccaacccgtatcaccttgttcaccggctactccggtattgatggcgataccttcaaggtcaaatggctgatggataagtacggcatccagatcaacaagacctctatcaactcggttttgtttcagaccaacattggcaccactggctcctcctgcttgttcttgaagtcctgtttgtccttgatctcccaagaattggaccagaaaaagaccttgttcaacgagcgtgatctgaatcagttcaacgaatccgtgtacaacctggtttccaattatatcgagctttcacagttctccggttttcacccactgttcaaaaagcgttactccacctcttctatttttaaccgtgaaggcgatcttcgaaaggctttctacttggcgtatgaagaggactacgtggtctatatccttttgttggatttgaaggagcgtatcaaaaagaaagaaatgattgtctccgcatctttcatcattccttacccacctggctttccggtgttggtccccggtcagatcatttccgaagagatcgtggattacctgtccggcctttctgttaaggagatccacggctacgatgaaaacattggcttccgttgcttctacaacttcatcttgaactacttctaccatattgtgacctctgatccatacgcatactatcagaagatggataagaaaacctatgacaagttgaagttgtcctccttgaacaagaagaagaacaccgacgacatctaccacctgtacatctacgataaagaccgtaacaagttgaagaagatctacttgcgtaatggcagaaacgcttccaccgacaacaataccaccgtgtccgattcctacgaagaagtgacctcttgctccatcccacacattggtcctgtgcgacgctgtgtcccggcaatctcctccgtgtccgcagtgtccggcggctccgcaatcggacgtattgacgcccagaagcaatgctccgagaaagaagataacttctgtgacgtgaatggagagaacggcctctctaacgacatctcctccttgaacaattctgaaaacacctctccacagaagaagtcttccaccgagagcatcattaaaaagggtcactacaacgaatccaccatgaagggcaagaagaacttgcgtaaatacatctccgttccgaacaatattcgcaccgatgaatataacgtgttcttgtctaagatcaaagagggtgaatttgagatcattggcaccccaaagaacgacaaccgcaacttcttggtgaactccgcaaactgctactataacaaaaaggccaaagatttgatccgtcaaaccaacggcttcaagaagatctacaaggaccacactcacttgtgcaccgaggataacctgatcgtcgatcgtgacatttgtaactcctctggttccaatggacagaaccacttcgaacgcaaaaagaacatgatcaagaacgatctgccactttccaaccgtgaagaggttggcatggaagtggagaactgggaagaggcacgaatcggcaccgccaactgggagaaggttcctaacggcgaacacctgtccaacgttgtgttcaaaaagcatcgaggtgacgtgatctttgaagaggatcgcttgtccgtgcgtcgtacctgcaacgtgggcatctcccaccgtttgtccggccgtcgtcgtggtaacgtttccaccgcaaatccggaaaacgcaatcctgcaggccggtcaagtcaacgccgttcgctccaaaccaggcaagggcaccggtcgtggcgtgggcaagaacagaaatggcatcattactgaacgtggaaatatcccaaacggctccattaccaacaagcaaaacatgttgtactccttctccgacgtctattccatccgtcaggttggcaagatgaacaacaaggatggcgaaaaatacgaccacatcctgaccgatgtcgttcctaagattaaacaatccaacatcatcttgtacaacaaaatcaacaacaactctatgcttgtgcagcgtaagcgactcagcaacgtcaatgattacacctgcaacctgaatgaaaagaacaaccacaaagaataccgtggcaaggacttcgtgtgttactcagattcgaacaaaaagaacaagaatgtgatgtacgtcaaacatgaagaggaatatgtcaaggaagaatccgatcaggacatcaacgaaaacatcttcgagtacaacaacaagttgtttcgtgttaaccgagtgatcggcaaaaaggaagacgataacggtattggctccaccggcgtgatccgaggccacaacattgagatgtcccgttgcttggagttcacccagggccaaccaacccgtgaggaaaagaagggtcgagatatgcattccaacgtgaactccgtgtccaatgtgcgtaacttgaccaatggctcctcttctatgggcaaccgtatccgtgctggcatcattggtaaccgttcccgtggccgtacccgtgtgaagaagcaaagcaaccgatcctctatgcaggagccgttggcgcacgtctcctacctgcccgaacaaaacatcaagcgcaatgttgaggaaatgtatatcgaaggcgagccaattcgtgaacgagacaccgagcagaacgttttcatctccaaagtgccttctgaacgtgatggcctgaacggcaagggtctttcccacacccattgcccaaacgaggctaagtctcacaactacgcgaacgaaaatatgtgtactgacatgaactatgtgaccaaggaaggcgatatggaaggcgtggtcaacggcaatgctcatgaataccctaacgagggctccaatggcctcgttaacgtgttggcgaacgataactcctccttcaagtcctcccagaagtcctccgattcctccaactgccgtgatgagtggggtcagatgggcgatgtccaccttaatttcgttggcaacgatcaaggccacggcaagttgaacactcaggaaaagatcgaaaccgagatttgccgttcctctttcccattcaacgaaaaggagctgaacaaagaccctgtgctgcttgaaaatgctggcgatcgtaactccccacgtaagttgaacaccctgaacaacaactcctacatcaacaacttgatcactaacgtggacgatgacacctttgtccacaaggaaggcaacttctttttggaatgcgcgatgaccaactccgagatcaactgctcctccttcgaaatggacatgtctttgaacaatatctacagccacgatggtgacggaattggccagcacatgcatcgtggcggcgataaaaagggcgagttcaag

SEQ ID NO: 209 - DNA, 1491 bp, Firmicutes bacterium CAG:345
atgaacaaagaaaagcaaaataacacaccgtttttctcagagatgaagaaatacatcgaatcagatccgacgtgctttgacgtccctggccataaaatgggaaatttcgataacgaccttgaagagtatgcgggaaaaacactttacaaactggatgtaaatgctcctatcggcttggacaatctgtatcatccgcatggcgttattaaagaagcagaggatctgcttgccgacctttacaatgtggatgaagcactgttttcaattaatggtacaacgggcggaattatgacaatgattatcggcacaatcgatgctaaggagaaaattatcctcccaagaaacgttcataagtcaattatcaacagcctgatcctttctggcgcgtatcctatttttgtcatgccagatacagacccggaaacgggtattgccaacggggtaaagatcgataactacatcaaggcaatggatgaaaacccggacgctaaagccgtctttgtaatcaatcctacctacttcggagttactagcaacattaagaaactggcaaaagaagcgcatgagagaaacatgattgtgatcgctgatgaggcacatggctcacatctgtattttcacgaagatctgccattgggagcaatggcagctggagctgatatttcaagcgtcagcttgcataaaacattcggctcactgacgcaatcttccgccatcctgattaacaaagaaagaatcaacgtttcaagaattaagaaagtatacgcaatgctgtcatcaacatccccgaaccatatcctcttggcttcaatcgatgtagccagaaaacgcatggcacttgacggacacaaactgctgagcaatacactggatctggctcgtaagacaagagaaagaattaacaaaatccggggttttcattgcctggataaatcatatctggacggcaatggacgattcgatattgacgaaaccaaattagttattaacacttcggaagtgggtttgtcagggttcgaaatttttaaactgatgcgcgaagttgagaacgtgcagatggaactgggcgaaatttcagaacttctcgcgatttttacaatcggcacaactcaaaaagatgctgaccgtctggttgaaggtcttcagaaaatttctgataagtactacgatattaccgacatcaagactatcccgcatttctcatacagcttcccagaactgattgttagaccgagagaagcatttcacgcgccttccaaagttatttcactggatgacgcggtaggcgaaatttcagctgaatcgattatgatctacccgcctggtatccctcttgccattccgggcgaaattatcacgcaaaatgcaatcgatttgctccatttctacgaaaaagaaggcggcgttgtgctttctgattccccggacgggtacattaaagtgttagatcaggacaagtggtatctgggcagcgaattggattacgacttt

SEQ ID NO: 210 - DNA, 1491 bp, Firmicutes bacterium CAG:345
atgaacaaagaaaaacaaaacaacacaccgtttttctcagaaatgaaaaaatacatcgaatctgatccgacgtgctttgacgtccctggtcataaaatgggcaattttgataacgaccttgaagaatatgcgggaaaaacactgtacaaacttgatgtaaatgctccgatcggattagacaacttgtatcatcctcatggtgttattaaagaagctgaagatctgcttgccgacttatacaatgtggatgaagcgttgtttagcatcaacggcacaacgggcggaattatgacaatgattatcggaacgatcgatgctaaagaaaaaatcatcttgccgagaaacgttcataaatcaatcatcaacagcttaatcttgtctggcgcgtatcctatttttgtcatgccggatacagaccctgaaacgggaattgccaacggtgtaaaaatcgataactacatcaaagcaatggatgaaaatccggacgctaaagccgtctttgtaatcaatcctacatactttggagttacgagcaacattaaaaaacttgcaaaagaagcgcatgaacgcaacatgattgtgatcgctgatgaagcacatggctcacatttatattttcatgaagatctgccgcttggagcaatggcagctggagctgatatttcaagcgtctccctgcataaaacatttggatcacttacgcaatcttccgccatcttgatcaacaaagaacgtatcaacgtctctcggattaagaaagtttatgcaatgctgtcaagcacatccccgaaccatatcttgttggcttcaatcgatgtagccagaaaacgcatggcacttgacggacataaactgctttcaaacacattagatttggcaagaaaaacgcgtgaacggattaacaaaatccgcggctttcattgtctggataaaagctatcttgacggaaatggtcgttttgatattgacgaaacaaaactggttatcaacacgagcgaagtgggcttgtctggatttgaaatctttaaactgatgcgggaagttgaaaacgtgcagatggaactgggtgaaatttctgaattattggcgatctttacaatcggcacaacgcaaaaagatgctgaccgtctggttgaaggacttcagaaaatttcagataaatactacgatattacagacatcaaaacgattccgcatttttcttattcctttccggaattgattgttagaccgagagaagcatttcatgcgccttccaaagtcatctcactggatgacgcggtaggcgaaatttctgctgaatccattatgatctacccgcctggtatcccgcttgccattcctggcgaaattatcacacaaaatgcaatcgatctgcttcatttttacgaaaaagaaggtggcgttgtgctttcagatagcccggacggttacattaaagtgttagatcaggacaaatggtatttaggcagcgaattggattacgacttt

SEQ ID NO: 211 - DNA, 1353 bp, Cyanobium sp.
atgttccctcgtttgtccgtgtcccacccattggcattgcacctgccggcacacggccgtggccgtggcttgaccccagcattggcccgtttgctgcgagaacgtccaggctcctgggatttgcccgaactgccagagatcggcggtccattggaagctgagggtctggtcgcggaagaacagcgagcatgcgcagcattgttgggcgctgagcgctgttggtttggcgttaacggtgcgtccggattgctgcaagctgcattgttggctttggcaccaccaggctcccgtgtgttgctgccaagaaacttgcaccgttccttgctccatgcatgcgtgcttggtcagctccaacccgtcttgttcaccccgccctttgacccagccactggcctttggttgccaccacgtgcagaacacttgtcccgtgcattgttggcagcccttgccgatggccctttggctgcggtggtcttggtgtccccgacctaccagggtttcggagctgacttggaagcgctggtccctcttgttcacggcgcaggtttgccgttgttggtggatcaggcacacggccaaggagaggccctggcagctggtgctgatttggttgtgttgtcctgtcagaaggcaggcggcggcttggcacagtctgctgcgttgctggcacaaggcccacgtttggatgcagacgccctggcacgtgcattgttgtggctgcaaacctcttctccgtccgctttgctgcttcactcggcagccatgtccctgcgtcacccacactccggtgctggccgtcgtcagcgttcccgtgcattggccatcgctgcgcaactgcgtcgtcgtttgcgtgctttggcgctgccccttgttgatggtcaggacccattgcgattggtgctgcacaccgcagccttgggcatcaacggtctggaagcagatgcctggctcttggcccgtggcgtgattgctgaattgcccgagccaggcaccctcactttctgcttgggcaccgcaccgccccgacgcgtggtttgggagctgccacgtgcattggtgggccttagacaggcattgggcggcgatccattgccggcattctccccaccaccattgccaccagtcgccgaacctgagcaaccaatcgctaccgcttggcgtgcacccgcagaaactcttccactcgctgcggcagccggtcgtattgctgctgagcctttgtgtccatatcctccgggcatccctctgcttatcccaggcgaacgactggatggcgctcgcgtggtctggttgcagcaacagcaacgtctgtggccaggccagattgccgacaccgtccgagttgtgcgctcc

SEQ ID NO: 212 - DNA, 324 bp, Shigella dysenteriae
atgtgctgggaaggcccattcttgccaggcgatatgaccatgaacgtgatcgctattctgaatcacatgggtgtctacttcaaggaagaaccaatccgtgaactgcatcgagcgcttgagcgcctcaactttcagattgtttatcccaatgacagagatgacttgctgaaacttatcgagaacaatgcacgactgtgcggcgtgatcttcgattgggacaagtacaacttggaattgtgtgaagaaatctccaaaatgaacgagaacttgccactgtacgcatttgccaacacctattccaccttggatgtctctctgaacggc

SEQ ID NO: 213 - DNA, 1461 bp, Eubacterium sp.
atgaagaaagatctgctggaaagattagaagaatattgcggtgctgactacgtcccgttgcacatgcctggcgccaaacgcaatacacaagaatttgtaatgccgaacccttatgcaattgatattacggaaattgatggctttgacaatatgcatcatgcggaagacatcctgaaagaagcatttgaaagaacagcgaaactttttggcgctgaagaatctctgtggcttattaatggatcaagcgccggtttattggcagcgatctgcggagcaacaaagaaaaatgatacggttttagtggctagaaattgtcatcgcgctgtgtataacgccatttacctgaatgaacttaacccggtttatctgtaccctaaagaagtgacatccggtatttatggcgcggtttctccgtcccaagtggaacaggcttttaaacagcatgaaaacatcagagccgtcattatcacatctcctacgtatgaaggaatcgtttccgatgttaagaaaattgcagaaatcgttcatcgctacggaaaaattttaatcgtggatgaagcacatggcgcacattttgcgtttcatgaagcctttccggaatcagcagtcttttgcggtgcggatgctgtaatccaatcaatccataaaacattgcctagcttgacacaaacggcgctgcttcatcttcagggaaacattgataaagaacgtgtcagacgctattgggacatgtaccagacaacgtcaccgagctatgtcttaatgggcggaattgatcggtgtatgacagtattagaaacgaaaggcaaacctttgtttaacgcctatgtaacacgtttgttggcactgcggaaaaaactggaaattcttacaaacatccgtctttttccgacggatgacattagcaaaatcgtcctgcttgtacgggatggcaaaaaactgtaccaagaattattgaacaaataccatattcaactggaaatggcgtcacttcagtatgttattgctatgacaagcatcggcgatacggacgaatattacgaaagatttttcgaagctctgcgccaaattgatgacgaaatgcagacaaaaatccgtcggggacaaaaatctcaacttcagacggaacaaaacatcaaacagagaaacgaattaccgacagaattggaaaacgttgaaaaaatcacggcctttatggaatgctttccggaagtgaaatgtaatccttatgatgcgcagaacggcgacgctgaaccggtcgaattaggcttgtgcgtaggacgtacagctgccgcaggagtttgtttttatccgcctggtattccgcttatccaagcaggtgaagtgtacacgggcgaaattgcggaaattatccgcgaaggaatccagaaaaatttagaagtgatcggcatcgaaaaatcagaaaaaggagtctacgtatcttgtttgaaatcctacttt

SEQ ID NO: 214 - DNA, 2898 bp, Cupriavidus basilensis
atggctcgttccaccgctcgaaaggcgaaaaccggccagcacatctctttgaaccgttaccgttccgtgtgggaaatgcgtgccgatggatggatgaacctgaccgatgacctgggccgccttgttaacttggcacgtgaatgcaaagagttcatcgagcgtcacgcacgtgtgaaggagaccttggcgatgctggaaccgattgagagattttgggcattccccggccatcgtctttttgaagaattgaccgcttggttcgaagcgggcgatttgggccgtttgaacatcgcggtgcaccgtatcaacagaatgttggcatcggatacctatcgtcataagaaattgtccctggacgccgaatctgaagaaccaagcgagatcgaaaccgaagaggaaatgcaggcacaaatcgcccgtccctacttcgaggtgttgattgtcgatgacatgacccgagaagatgaagaagcattgcgtcgtcgtgtgcagcgtaagcaacgagtggatgacccgtttgtctgggatgtggtcgttgtgccctccttcgaagacgctttgatcgcgaccctgttcaactttaacttgcaggcatgcgtcattcgacacggcttcccattcaagtccgagtacgaactggatttgctgcgcaagttcttggaaggcctggacgagggtatcgaggaacaaccagagtctgaacgtggcccacttctcggccagaaaattgcccaactgcgcccagagcttgatttgtacttggttaccgacgtgaaggcagaggaaatcgcctcccgtttgggtgaagtgttcaaccgcattttctttagagaggaagatcacaccgagctgtacatgtcaatcatgaagggcgtgtccgaacgttataaaaccccattcttcaccgcattgaaggaatactccaaacagccaaccggtgttttccacgctctgcctcttgcacgtggcaagtccatcatgaactcccattggattcaggacatggcgcaattttatggtctcaacttgttcatggcagagacctctgccacctctggcggcttggattccttgctggacccgatcggccccattaaggttgcacaggaatacgcagcccgtgcattcggcgcacgtcgtaccttcttcgcaaccaacggcacctctaccgccaacaagatcgtcgttcaggcattggtgaagccaggcgacatcgttatggtggaccgtaactgccacaaatctcaccattatggtatggtcctggcaggagccaaggttgcctacttggattcctatccactgaatgacttttctatgtacggcgctgtgcctatcgcgcagatgaagcgtacccttctccgcttcaaaagagctggcaccttgcacaaggtccgaatggttttgctgactaactgcaccttcgatggcgtggtctacgacgtgaaacgtgtcatggaggaatgtctggccatcaagccagatcttatcttcttgtgggacgaagcatggttcgcttttgcgcgtttccaccctacttaccgacagcgcaccggcatggattctgcatcccgtttgcgacgcgaattggattcagaggactacagacaacgttatgatgcttttaccgcatccttcggcggcgcagactgggatgacgaggaaaagttggtggcaacccgtctcatgccagatcctgaccgtgcacgtgtgcgtgtttacgccactcagtccacccacaagaccttgacctctttgcgtcagggctccatgatccatgtttgggatcaagactttaaggataaagcagaggaagccttccacgaagcctacatgacccatacctctacctctccgaactatcagatccttgcatccttggatgttggccgtcgtcaggtggagcttgaaggttacgaattggtgcagcgacaaatggagttggccatgactctgcgcgaatggattcacacccacccattgttgaagaagtacttccagttcttgaacgtgtcccgtgtggtgccaaccgcttacagacccagcggaattgaagcatactattccccagagtccggatgggctaacatggaggctgcgtggagagttgatgagttcgcactggaccccactcgtctgaccctttctatcggcacctctggtattgatggcgataccttcaagaacaaatacttgatggataagtacggtatccaaattaacaagacctctcgaaataccgtgctgttcatgaccaatatcggcaccactcgttcctctgtggcataccttattgaggtcttgatcaagattgcccgtgaattggaggaacgaaccgctgatatgtccgtgatcgaacgacgcttgcacgaaaagcgtgtgtcctccttgacccgagagttgccacctctgccagacttctcacacttccattttgcattccgttccgtgtgcaactcaggacagatcgaaacccctgatggcgacattcgtaaggcattctttatgtcctacgatgaggaaaactgtgaatatctgaatatggcagaagtggcaaaggcaatctccaaaggccgtgaagtggtgtccgcattgtttgttatcccgtatccgcccggtttcccaattttggtgccaggccaggtcatctcctccgaaattctggagttcatgcaagcacttgatgtgcgcgagatccacggctaccgtcccgaacttggttttcgtgtcttctccgacggtgctctgcagcaattggcgttgcaggcagctggagaagctgcggcagccgtggctgcggcagccaaggcatccgtttctgccgtggtggaagtgtccaccgcgaccgttgatgaagttgctgcggcagccttggcagaccgtccagctgcgaagaaa

SEQ ID NO: 215 - DNA, 1491 bp, Clostridium sp.
atgaacctgaagcgtcaggaacacaccccgttgctggacgctatcaagaaatacgtggaatccgagccggttcccttcgatgtgcccggtcataagatgggctccttgaaaaccgagctttcggattacgctggcgaaatgctgtatcgacttgacattaacgcgccgatcggcttggataacttgtaccaccccaatggcgtgatcaaggaagcagaggacctgttcgctgaggcgtttggcgctgatgaagcgatcttctccgtgaacggcaccaccggcggcattatgaccatgatcgtcggcatcattgacgcaaaggataaaatcattttgccgcgtaacgtccacaagtccgtgatcaacgccctgatcctttccggcggcatcccaatttttgtggctcccgatgtggatcaagataccggcatcgcgaacggtgttcccactgagaattacgtgaaggcaatggacgaaaacccagataccaaagccattttcgtgatcaaccctacctattttggcattacctctgatctgaaggcaatctgcgaagaggcccacaaacgtggaatcattgtcatcgttgacgaggcacacggcgcacacttgcacttcaacgatagcatgccgctttcagctatggaagcaggtgccgacatctcctccttgtccgtgcacaagaccggcggctccttgactcagtcctccgtgatcctggtcaagaaagatcgtgttaacttctctcgcatccaaagagtgttcgcgatgttctcttccacctctcctagccacttgttgttggcttcccttgacgtcgcgcgaaagaaattggtttttgaaggcaaggagctgcttgataaagaattggaattggctaagtacgcacgtgaaaagatcaacaatatccgtggctactcgtgcatcgacaagtcctattgtgatcgtccaggtcgattcgactttgatctgaccaaagtggtcatcaacgtttctgaggtgggactgagcggcttcgacgtttacaagactattcgcaaagaatccaatatccagctggaacttggcgaagtgtccgaagtgctggcaatcatttctcttggcaccactaaggagcacgtggacaagttgattgcagccttgaagcgtatctccgatgaatactatgactctaccgatgtgcacaaggtcccacatttcaaatacgagtatccagaattggtggtgcgtccacgtgaagcattccacgccccttccaagattgtggctctggaagatgcggtcggcgagatctccgcagaatctttgatggtctacccaccaggcatcccaattgcaatccctggcgaaatcattaccaaggacgcattggatttggtcgagttctacgaaaaatccggcggtgttctcttgtcagactcgccagatggctatattaaggttatcgaccaagagaaatggtacttgcgttccgaaatcaactatgatttt

SEQ ID NO: 216 - DNA, 1407 bp, Carboxydocella sporoproducens
atggcgcagctgcgtgcatacggcaagatcaagattatgaacaagcaagcagattgcccaatcttcgacgccattaacgagtatttggctcagaaaggcgattgttggcacatgccaggccacggccagggccgtgcatttcaatccttgtggcccgaactggcagccgtggcaagatgggatgtcaccgagatcccaggcttggatagctggcaccaacccgaaggctgcattgctgcggcagaaaagttgctggccgaggcttaccagacccaggcatccttcttcttggtggagggtgcgtccgcaggcatctgggctatgatggccgctgtggtgtcccagaacggtaatcgtatcgcgattccacgatgggcacacgcttctgttttccatgcgcttgtgctcaccggcgcagagcctgtcttctacccacctgtgttcttgccagaatggcaactgatcattggccctgaaaccgagggtgtggctttggattctgacggtatcttctttctgtacccatcctacgaaggcgtggcttggcctcttaaggattggatgctcgccaactcctataataccactgctccagttcttgtggacgaagcacacggcgcattgttcccttggcatgagcgtatgccagtgtccgcaattacctctggctgtgatggtgttgtgcacggccttcataagaccggcccagccctcactcagaccggctacttgcacctgcctaccgccaagttgaaagctgattgggtgcgtaagaacttgtccttgctcaccactacctctccatcttacttgttcatggcggcattggatttggctcgtcgagaactgtattttcacggccgtgaaaagatcgagcagatgttggaatgggcggagcaacttcgctgggaattggaaagaatcggtattgaagtgttgaaaccagagcagctgcctgccggctaccaacttgaccgcaccagattgctgcttcgtctggaaggatataccggcgtggaagtggcaacccacctgcgtcagaagggtatcgtcgttgaaaaatacgaggccgatcgagtgctcttgctgatcaactatgacttcaatccagaacagggcaagcgtttgattgaggcattgggtcaactgaagccgaaaaccggcaagcccaactgctggaaagaacagttttacccagaagagaatcgtcttgtcatgctcccacgtgaagcatggttggctaagaaagagcgcgttgcgactaaccaggcaaaggatagagtggccgctcagaccgtggctccatgcccgcccggcctggcaatcgtttgcccaggcgaagtgatccaggccgacaccattgcggcattggaagcatggggcatcgaagagatttgggtggtcaaa

SEQ ID NO: 217 - DNA, 1134 bp, Azospirillum brasilense
atgacggataaaatcgccagatttttcgaagaacaaagaccgcaaaccccgtgcttagttgtggatttggacgtcgtagaagcaaattatcatgatctggaagaagcactgccggacgcaaaaatcttttacgctgtgaaggccaacccggcacctgaaattttaggactgcttactcggttgggctcagcgtttgatacagcttcagttccggaaattcaaatggtgcttgcagcgggatgtgcaccggaaagaatttcttatggtaacacaattaagaaagaagcagatattagacgcgcatttgaacttggcgttagactgtttgcgttcgactccgaagctgaactggagaaaattgcgcgtgctgcaccgggcgcaagagtgttttgccgcattctgacatcaggggagggcgcggaatggcctctgtcaagaaaattcggatgtgatctggcaatggcgcgggaattattgctcaaagctaagggcatgaatgttgttccgtatggcgtttcatttcatgtgggctcccaacagaaagatttgatgcaatgggaccacgccatctttcaagtcgcacaactgtttagagaactggaagtccttggagtagatctgggtatgattaaccttggcggaggttttccgacgcgttatcggaccgacgttcctgaaacaacggcctacggacaggcaatctttgaatctcttcgaacacatttcggaaataggttacctgaggcgattgtcgaaccgggacgctctatggtagggaacgctggcattatcgagtccgaagtcgtacttgtttcaagaaaaagcgccaatgatgtcaagcgctgggtatatttggacatcggcaaattttcaggcctggccgagacaatggatgaagcaattcaatacccgatccaggttatgggagatgacggagagggcgatagtgaagcggttgtgcttgctggccctacatgcgatagcgcggacgtgttatatgagcgtgctgaatacaaattgccgatggatctgaaggcgggcgatagagttcgcattcatgcgacgggtgcttataccactacatacagcgccgtgtgctttaacggcttcgcacctttacaacagatttgtatc

SEQ ID NO: 218 - DNA, 1383 bp, Salmonella enterica
atgaacgccaaggtcatcaacatgacccgtaccaccccagtgatcaacaagatgcaggcgatgcacgatcgaaatatcttttctttccatgcattgcccgtttcctcttacggcgaatccgatgtggtcggtgacgcgcgtaacgaaatcttggcatatccagaatcctccgccaccggagaactgttcgataacttctttttcccttccggcgtgatctgcgagtcacagaagctgaccgctggtatctacggctccgattcctccttctatattaccggcggcacctctaccgctaaccagatctccatctccgcgctttacgataaaggcgaccgtatcttggtcgatcgaaactgccaccagtccgtgcacttccatgtgcaaagcattggcgccgagacccattacctttgcccagatttgcgtactgaagacggcgagatctgtgcttggtcctataaccaccttgaacagaccttgctgaacttgcagcgttctggcaaggcatgcgacatcgtgattctgaccgcgcagtcctacgagggaatcatctacgacatccctggcgtccttacccgtcttctctccgccggtgtttgtactcgtcgatttttcatcgatgaagcatggggctccatgaactacttctccgaagacacccagtctcttactgcgatgaatatcgaaccgttgctggataagtaccccgatttggacgttgtgtgcacccactccgcacataaatctttgttctgcctgcgccaagcatctatcattcactgtagaggcaccgccactttgtccgaacgcatcgagaccgctaagtaccgtatccacaccacctctccgaactatcccatcattgcatccttggatgcttcacaggcgatgatggcatcccacggcaagaaattggccaaccatgctcgcatgttggtgcgtaaatttgtcgcaggcgtgtcctccttgaagtacttcggcgagaaagcaatctgccaaggaatcttctcctcccactggcatatctactatgatccgaccaaggtcatgttggacgtttcctctctgggaaacggcaaagacatcaagaagttgctctgtaacgagaatatctacgtgaagcgattcattaacaacgtcttgctgtttaacttccacatcggcatcaacgaacaggcagtgtcctccttgctccaggcattgaactccatctcccaggagatctacaagcaagaccgttccaaagcagaagtgtcctccaagttcatcattccatatccacctggcgtgccattggtctttcctggtgaaatcattgatgacgagatccgtaacaagattcacgaataccgtaagaacggcttcctgatcattgcagcc

SEQ ID NO: 219 - DNA, 1425 bp, Salimicrobium jeotgali
atgacaagacatgaaaaagccccgttatgggaagcagtcaaacaatatagacatggcaaagccggatcttaccatgtgcctggtcataaaaatggcacagtctttgatacggaagcacgtgaagtgtttcgggaagtcctggaaatggacacaacggaaattccgggtctggatgaccttcatagccctcgtggcgctatcaaagaagccgaagaattagcacgtttgtactttaaatctgaaaaaacacggtttttagtgaatggaagcacgtctggtaacctggcgatgattcttgctgtctgcagacgcggctccccggttctggtgcaacggaatgctcataaatcaattctgcatggcatcgaacttgctggagccaaaccggtgtttcttgcgcctgaatgggatgctcgtacgggtaaatattcaagcctgacgccggaacgtgtccgggaaggacttcggcagtttccggaagcagtcgcggtaattgttacatatcctgattactttggccatacatttaacttatccgcgatcacgtcattggtacatgaagctggaaaaccggtgcttgtcgatgaagcacatggtgttcatttttccttacatagagattttcctgacacggccttggcagcgggagcagacatcgttgtgcaaagcgcgcataaaatggctccggccatgacaatgggagcttatctgcatacgcagggtccgcttgttcctgaaaaacgcttatcatatatgttgcaagtcgtacagtcttcctcaccgagctaccctgtaatggtttctttagatttgtgccgtcggtatatggccatgtggaaagaagatggcctgcttacatttttagacgaagttagagaagaattggatgcgtgctgtgacggatgggaagttcttccggcttctcctcaagatgacccgctgaaagtagaacttaaacctagacgcgttgatggctttacattagcgtcaatgttggaagaacagggaatttacgcagaaatggcgacaaatacgggtgtattattgacgtttggcttagaacgcccggaaagctgggaaaacgataaagctgccttttatgaagtcgcgagactgcttcaaaaacgcgaaaaacatgataaaatcatcgacaacaacatctcttttccgcctgttcaacagctggatgctcagtacgaagaaatggaagaccttcaacagacatgtctgccgcttgaaaatgccgtagaacatattgcagcggaagcagttatcccgtatccgcctggcattcctttgatcttgaaaggagaaagaattagacaagaacaggtggaacatattagaacactgatcgaaaacaaagccgtgtttcaaaacgaaaacatcgaaaaagcagtcacgatctttcaggaagaatggagc

SEQ ID NO: 220 - DNA, 2283 bp, Serratia proteamaculans
atgaaggcattgttggtggaatccgagttcaccaccccaggcggctacccaaccgcagcaatcggtcgtcttattgaacagctcaacggacgtgatgtcgaggttatgcgagccacctctttgcaagatggcgaaagcatcattgacgccaatgagccaatcgattgccttctcttggctcgttccatgccagataagaaagctgcggaccctgcgcagaagctgcttgataaactgcacgaacgccaagagaacgcaccagtgttcttgttgtccgacagaggcaccgtgaccaaggaattgtccttggatatgatggaacagatctccgagttcgcatggatcttggaggattctgccgactttatcgctggccgcattatggcagccatccgtcgttaccgtcaactgcttttgccaccattgatgtcggccatcatgaagtacaaccagacccacgaatattcctgggcagtgccaggccatcagggcggcgtgggcttcaccaagacccctgcgggccgtgtgttccacgacttttacggtgaaaacctgtttcgtaccgattccggtattgagcgaaccgcacttggctccttgttggatcataccggctccttcaaggattccgaaaccaatatcgcccgagtgtttggcgctgaaaagtcctattccggcgtggtgggcacctctggctccaaccgttccgtgatgcaggcgtgcttgaccgaagaccgcggtgcagttgtggatagaaattgtcacaagtctattgagcaaggtttgatcctgaccggagcaaccccaacctacatgattccgtctcgtaacccctatggcatcattggcccagtgccaaagtccgaaatgctgccggacaccatcaagaccaaaatggatgagaaccccttgggcatcacctctattgactacttcgtcctgactaattgcacctacgatggcatctgctacaacgctgcggaagtcgttaatgttattgagggcaagggcaccttcatcccagtggtccactttgacgaagcgtggtacggctatgcacgcttcaacccgatgtacaacaattattttgccatgcgtggcgatccaaaggaccatacctctgatttgtccaccgttgtggctacccagtcctctcacaaaatgttgaacgcgctgtccccagcatcttacatccatattcgtaacggcaagaaaccactggatttccctcgtttcaaccaggcatacatgatgcacaccactacctctcctagctatatcattgcagcctccaacgacattgctgcgaatatgatggatggagaaagcggccagtccttgacccaagaagccatcaacgaggctgtggatttccgccaggcacttgccagactccataccgagttcaaggcaaaagaagagtggttctttaagccttggaatattgagaagggacgtaaacctggcgaagagaaagatgttccgttccaggacatccccgctgaagcgttggcaaccgaccaatcctactgggtcatgaagccagaggataaatggcacggcttcaagaacctggatgccgactgggctatgatcgacccggtgaaggtctctattcttgcccccggcatcaaagtcgatggcaccttggaagacaccggcgtcccggcagccttggttaacgcgtggctggcacgcaatggtatcgtgcccacccgtactaccgatttccagttgatgttcttgttctctatgggcgtgactaagggtaaatggggcaccttgttggaagcattgttgtccttcaagcgtcactacgacgcaaacaccccattgtccgaagtgcttcctgatttggctgcgaaatactcagcggagtatggcgcacttggtctcaaggatctgggcgacaaaatgttcgcatttcttaagcaggatgatttgggtaaacttctcaaccaagcctacgatgctttgccgaccccagtcctgaccccacgtgcagcctaccagaagctggttcgatatgacgttgaacctgtgtccttgaaagatctgcacggccgtattgctgcgaacgccgttcttccgtacccgcccggtatccccatgctcatgtcaggtgaaaagttcggagagcgagtgggcgacaaagaatcggcgcagatcgcatatttgctggctttgcaaaagtgggatgacaccttcgccggttttgaacatgagaccgctggaatcactattaccgataagggcgagtaccaggtgctgtgtatcaaatcc

SEQ ID NO: 221 - DNA, 1422 bp, Sporosarcina ureae
atgaaatatcaagatcgtccattggtgcaagcactgcaaaattttcatgaccggtccccggtttcatttcatgttccgggccacaaaggcggcgcactgagcgatctgcctgttgcagtgcgtcaagcacttgcgtatgaccttaccgaactgactggtttggatgatctgcatgaagcaacgggggcgatcaaagaagctgaggataaactggcctgcctttatggctcagaacaatcatttttcctggtcaatggctcaacagtaggaaacttagcaatgttgtacgcgacagttcaaccgggagatcttgtcatggtacagagaaacgcgcataagtctatttttaacgcgctggaacttacaggtgctaatccagtttttctgagcccggattgggacgaacaaacacagacggctggcacagtttcactgaaaacggtgaaagaagcactggcccaatatccagatgttaaagcagcggtgtttacaacgccgacgtattacggaattatcaacagagaccttcgccagattatcgaggtttgtcacagctactctattccgatcttagtggatgaagcacatggcgcacattttatcgtccatgacgcattccctaaatccgcgttagaattgggagctgatctggttgtgcagtctgcacataagaccttgccggctatgacaatggcatcatttctgcacatccgtagtaagttcgttaaggtggaacgcgtcgcccattatctgcaaatgctgcagtcaagctctccttcgtacttaatgatggcatcattggatgacgcacgatattacgcggaaacgtatgatgagaaagactacgaatcatttcaaatctatcgcaacaacttaatccagggcttgtgcaacattgcccgtgtagaagtcgtacggacggatgaccaattaaaactgcttatccgcgctgccggtcatacaggatatgtcctgcaagaagcactggaacaacagggaatctatcctgaacttgcagatctgtaccaagtcttattggtactgccactcctgaaagctggtgacgaagagagctgcgttgatctggtggaccagtttaaagtcgcaatggattgtctggcagaaaaggagaccactagcatgcgttttaataacttcacatcaaattcatcaccgtcatcagttgtgtatacagcgaaccaacttcacacaatggatattgaatgggtcagcatgcagtctgctattggaaaagtagcagcggctgccattatcccgtatccgcctggcattcctcttttatgcgcgggagagcggatcaatcaagaacacatggttcagatctatgatttgctcatggcgggttgtcgatttcaaggggctatcaacagggaaaagaaacagattaaagtcgtatttgaa

SEQ ID NO: 222 - DNA, 6786 bp, Plasmodium berghei
atggactccccaaacaatgcgatggtgtgcggcgaagataacaccatgtatggtaacaatatgttcgagaaccgtaacatcgaaaacgattacatgaacactaacaactcaactatgggcgtggataccgagtccggcgtgtacttggataaggaaggcaaaaacccattctacatctatccttacaaccttaaacagaatcgctccgcaattttgaagatgatgcgtcgaaagaacaaatacgagaacatcgatttgctggaaaagtacatcaacattaacaatgccaccaacgtctgctccctgcgtatcaaactttgggaggctttgatgctgtatgttaacaaggtcaatgttgaactgatctacttcatcattaactgtcttgaagagattgaagtgtactggggcgaagaggccaagaacaccttgcaggacatcatttccctgatcaacgacaagaaatacaaggaagtgtccaacaaaattggcgaagtcttgtcctccttgtccgtgacctctggcaagatcaacgatgactcgccattcttttataccttgattgtgtctggcaagcgtgaagagtactgcaacaacaacctgaacattaacaacaacaacatctccatgaacgctaataacaactataactctaacaacaacagcggtaactatttcaattcggatttgtcctacgagttgaacaagtttctgcagtatgaacaaaaccgtttctccaatcagaacaacaacaagaagttggaatacaagatcgtggaagtcaacaatgcaaaggaagcattgttggcttgcctgatcaacccacaaattctttccgtggtgttggtggataacttgatcattgatgacgagaccaagaacgattctaacaacaacaacaacatcttctttaacttcaacgaaaactcctccttgaacaagaactatctgatgaattacaacatccctaataacttcaaggtgaaacagaacatgtgctgttccaacattatgaacaagggcgtgctgtcatgcggagcctcgaataacgaccacatcaagacctctgaaaagaagtcccgtaactcccgtgatgacattaattccaacgatgacgagaccacctctatcaactgcattaatcgtgatgaaaatcgaaacgatgaccgtaactcctcctcctccggatggaactccatccagaataacattccaaacaccggcgacaagaacttgaaacgcaatagaatcttcttgaagaacgattacaagttcgatattggcgacttcgtccttggttacgaccaattggtgtccgcccctttggaaaagatgaagaaaggctataacagccttgtgatcttgatcaagtcaatcgcttacattcgttcctccgtggacatcttctgcgtgtgtacctctattaccttggataagctgcgttccgtgaataacaaaatcattcgcatcttcaccactcacgatgaccatagcgatctgcacgagtcaatccttgacggcgtgaagaaaaagattaaaaccccattctttaacgcgcttaagttgtacgcagaacgacctatcggtgttttccatgcattggccatttccaagggcaactccgtgcgtcgttcccgttggattcagtccttgttggatttttacggcgtgaacctgttcaaggccgagtcctctgctacctgcggcggtcttgattcgttgttggacccacacggctccttgaaggaagcgcaaatcatggcagcacgtgcatacggctccaaatactgtttctttgtcaccaacggcacctcttcttccaacaaaatcgtcatgcaggcgttggttaagccaggcgacatcattctggtggaccgcgcatgccacaagtcccaccattacggcttcgtcctgtttcaagcccttccatgttacttggacccatacccagtgtcccgttatggaatctacggcgctatccctatctacgtgattaaaaagaccttgctggaataccgtaactccaacaagttgcacctggttaaaatgatcattttgaccaactgcactttcgatggcatcgtctacaacgttaaacgtgtgattgaagagtgtctggcgatcaagccggatcttatcttcttgtttgacgaagcatggtttgcttacgcgtgcttccaccccatcttgaagttccgaaccgcgatgactgtggcagagaagatgcgctccaaagaacagaaaaagctgtactataagatccataaccgtcttttgaagaagttcggcaacgtgaagtccttgaacgatgtcccatcagacactttgctgaaaacccgactgtacccaaaccctaccgaatataaggttcgcgtgtacgccactcagtccatccacaagtccttgacctctttgcgccaaggctccgtgatcttgatttccgatgacaactttgagtccgacgcctataccccattcaaggaagcatactatactcacatgtctacctctcccaactaccagatccttgctaccttggatgcgggtcgtgcacaaatggaattggaaggctacggtttggtcgaaaagcaggttgaggctgcgtttctgatccgtcgagaactttcggaggacccaatgatctcccgttacttccgtatcttgaacgaagatgacttgatccctgattccctgcgacaatgctgtattgcctacatgaacggtggcaatacctctacccgctctggtaaaaagaaacacatccgtcgtaagaagatcaagaagggcaagcagaacagagatgaagagaaagaaaatgacaacgagcgtaagcaatacgatgaaatcaacatccagaagcaattctttatggaccacgattcttattcctctcgttacaacagcgcaaatgcctcgtactcctgcatctcctccaagcacgccaagggcggcatctccgagccgtttggcaacaccaagtacaatgctcatagcaataactcaaataacatcccctctttcgaatgcattaaccagggttattctggctccatctacgtcaagaaaaccctgggtaataacgcttacgcgtccaacgatcttccaaccgacactatcattgccaaccgaaataacggcgaaaacgagactaacaacatcaagaaatataactacaagaacgacgagcgctccatcaacggtgctgataccatcaactgcacctctaacttcgaaaatgatcagtatatcgaccgcaagatgagaaacgaagtggagaagaaatgttacgaggataacgcgaccaagaaaatgaacaagaagaagaacaagaagaacgaatcttacaaggacatcaacagcattaccaatgattcctcctcctccttcggcgcaaacgatgtgaaatgcgtctgtgttgactgcatgaagtccgaaaacatcgatgaggtcaacgacgaaattcgttctcgatgctgtaacagcgaatcctccggtgactgcgatgaatccgacatctacgacaaggataaattgtgttccaagtccaactccatcaacaactttctggaatacttcgagtgctcgtggctgtccgaagatgagtttgtgcttgacccaacccgtatcaccttgttcaccggctattccggtattgacggcgataccttcaaggttaaatggttgatggataaatacggcatccagattaacaagacctctatcaacagcgtgctgtttcaaaccaacattggcaccactggttcctcttgcttgttcttgaagtcctgtttgtccttgatctcccaggagcttgaccagaagaaggcattgttcaacgagcgtgatttgaaccagttcaacgaaaacgtgtacaacctggtctataattacatcgaactttctcagttctccgattttcaccctctgttcaaaaagaaatacagaaacatggacggcaagaacaacaatatcttcaacaaggaaggcgatttgcgtaaagccttctatcttgcttacgaagaggactatgtcgagtacatccttctcgcggatttgaaggaacgtgttaaacacaacggcatggttgtgtctgcatccttcatcattccgtacccaccaggcttcccagtgctggtccccggccagatcgtctcccacgaaattttggattatctgtcaggtttgtccgtgaaggagatccacggctacgacgaaaacattggcttccgttgcttctacaacttcatcttgaactacttcgataactccatcatttctgacccctatggctactaccaaaagattgataagaaattgtacgacaagctgaaaagagagtctctgcgtcaggaaaagcagaagaacatcgaaaactcctactatatctacgtctacgacaacaagaagaacaagatgaagaaactttacttgtacaacggcaacaccgtgtcctccgataagtccatcattgcggacaactttatggatgacgaaggcaccaactactcaatcgtgtgctcggatgcaaacaatggcaccgtcttcttgaacaataacaccccatccttgatcaacaccaataacatgcgtaagaacactaacatcaactccaagaacatcaacaacagcccgacctctgagatcccctaccacgacaacgatgaagacatgcataagggcgataacaaaaacttgaacaccatcccctccaactgcatctacatgaagaacaaaatgaacaacgaacaggagtgcctttgtaagaccggcttgaactccaacgtggagaagaactacgatgaaaagaacatcgactctattcacttccgaaagaacatgggtaatgataagtcctccccaaagaacaacgttcacaagatgcatcctgtgaacgaaaagaaaaagacctatggccacatcttgaagaagaactccaacaaaaagtacattctgaagggtaaagagatgaagcgttactattgcctgagcaacgaaaagaagaacaacaaatacaacatcttgctgaccaagatgaaaaataacgatagcgagattcctaagaacgaaatgtgtttgaacaacaactccttcaccaacatccagaatcaccatttcgatcacaaaaccaaccacttgattcgtaagaactattttcacgacaacacctacaacaagagcgaacagaacaacaagaacttcgatgtgtccgtgaacatgaagcgagaggatcactacggtgtcaacgcagacaacaacaacaacgaaaacgattgccataacaacatcactttgggaaacaccccgaagaacatcgaaactgacaacattcactactcccgtacctctatctctaacaatgaggattctaaaaacaccgaaaatgaagagaacaatgccaagtccgagttcgcttctgttcagaacacctctaccaacatcaagtgctgtattaacaatcgaaacacctcttgcctggcgaacggctccaaggagaacttcaacaaaatgtgtgaatacatgcagggaaactaccaaaataccaacgcaaactccttgttggacatccactatatgaagaagaactccaagttcaacaaatcggatgacggcaagtacaaaaagaaaaacaattcccattgcttgaacaagaaaatgaacacctctaacatcatcatgtctatgaagaccaccaagaaggatttgctgatcgagtacagaaactgtctgaatggcaaggatgaaaagttgaacaatgaccgtgtgttgaacaattacgtccgtaactccgaacgcgagaagaccaactattcagactactccaactctaacaagcgtttgaacaaaatcatctacggcaagtccgatggcgagaacatccagaaggaaatgaacaatgtgaccaacgaaaactcctacgaaccaaacaacaagttgctcaacaaagacaacatctgcttcaaccgtcgagaagaaaactacaacaacgataacgaaaacaacaacgaaaaggagaactacgacatcgtgtccaccaactgtgtgaccaaagatatgcaggaattgaacgagggtaacgttaatcctaataactactcctccggaaaccgtaccgattccgtgatgaacatcgaaaagctgaactgccacaataactgctgttcggaaaagtccggccgtaagaactcccaagaaatctgtcgtaagatgattgaagagaacgatgagaataacgcggaccgtggtaacaagaactccgtgcgtaagatgaacatctgcgattgttcaaacaacgaagagaccgaaaacaaccgtaactgcaacaacatcaagtgtggccagaataacctgaaccaatccaataccctttgctgtaagcaggatgacgagtataaaaacgaagatgattcctccaacgagggttacgtcaacatcaataacgttcacatcaagtccgaaattaaattctgcgtgaacaacttccacttgaacgagaatgacatccaagtgtctccgatcattgtcgaaaaggatattgacaaaaaccccaatcgtaagttgaacaccttgaacaacaactcctacatcaacaacttgatcactaacgtcgatgacgatacctttatccacaaggaaggcaacttctttcttgaatgcgcactcacccattccgagatcaactgttcctctttcgaaatggacattccactgaacaatgtttactataacggcgataacaatgacactaaagagtgccgtaactacgaaggcgataagcagaccaacttc

SEQ ID NO: 223 - DNA, 2130 bp, Aeromonas veronii
atgaacatcattgcgatcttgaatcacctgggtgttttctttaaggaagaaccaattcgtcagttgcaagcatccctggagcgaaagggcttcgaagtggtctacccagttgatgtggcggacttgctgaagttgattgaaaagaacccacgtgtgtgcggtgcaatcttcgattgggacaagtattcccttggcctctgtaaagagattcacgaccgtaacgaaaagctgcctatcttcgcttttgcgaatgatcagtctacccttgacatccacttgactgatttgcgcctgaacgtgcacttcttcgaatacagactgggtatggctgatgacatcgcgcttaagatgggacaggcgacccaagagtatcaggatgcaattcttccacctttcaccaaggcattgttcaagtacgtggaagagggcaagtataccttctgcaccccaggccacatgggcggcaccgcttttcagatgtccccagcaggctccatcttctacgacttttatggcccaaacgcattcaaagccgatgtgtccatctctatgccagaattgggctccttgttggatcactccggcccacataaggaagcagaagagtacattgcccgtaccttcaacgctgatcgatcgtatatcgtcactaacggcacctctaccgcaaacaagattgttggcatgtactcagcaccggccggctccaccgtcttggttgaccgtaactgtcacaagtcccttacccacttgatgatgatgaatgatgtgaccccgatctacttccgccccactagaaacgcatacggcatcttgggcggcatcccacaatcggaattttcccgagacaccatcgcagcaaaggtggctgctaccccaggcgcacaggcgcctcgctacgctgttgtgaccaactccacctacgatggtttgctgtataataccggcttcatcaaagaggccctggacaccccatatatccacttcgattctgcttgggtcccgtacaccaactttagccccatctatgagggcaagtgcggcatgtcaggagaggcgatgcctggcaaagttttctacgaaacccagtccacccacaagttgctcgcagccttttctcaggcatccatgatccatattaagggcgatgtggaagaggaaaccttcaacgaagcctttatgatgcacacctctacctctccacagtacggcattgtcgcatccaccgaaatctccgctgcgatgatgcgcggcaacaccggcaagagattgatcaaagattccattgaccgtgcgatctctttccgaaaggaaatcaaacgtctgcgagaccaatccgagggctggttctttgatgtttggcagccggataatatcgacaccgtggaatgttggaagttggacccaaaagatgactggcacggcttcaaagagattgatgacaaccacatgtacctggacccaatcaaggttaccttgctgaccccaggcatgggacgtgatggccagttgttggaaaagggtatcccggcatccttggtgtccaaattcctggacgagcgaggcattgtcgttgaaaagaccggcccatacaacatgttgttcttgttctccatcggtattgatcaatcaaaggccatgcagttgctgcgtgctttgaccgagttcaagcgaggctacgacttgaacctgaccatcaagtcgattttgccgtccctgtaccgtgaagatccatccttctatgaaggcatgcgcattcaagagcttgcccagcgtatccacgaattgacctctaagtaccgtcttccagaattgatgttcaaggcattcgacgtgttgccagagatgaagatgaccccacacgcagcctggcagcaagaattggccggtaatgtggtcgaggtcccgctgcgcgatatggttggccgtatctccgctaacatgatcctgccctacccaccaggcgtgccacttgtgttgccaggcgaaatggtgacccaagatagcttgccagtcctggagttccttgaaatgctctgcgaaatcggcgcacactaccctggctttgagaccgacatccacggcttgtaccgccaggcagatggctcctataccgtgaaggtcctgcgt

SEQ ID NO: 224 - DNA, 2340 bp, Pseudogulbenkiania ferrooxidans
atgagaacagcggttttatcagctttgtatccgagcgtgcctgtcacatttcggtatgctgtttacgaagatacgggaatgagatttcattttccgatcgtgatcatcgatgaagactttcgcagcgaaaatacatcaggaagcggtatccgtgaattagcagcggctatggaaaaagaaggcatggaagttgtgggatatacatcttacggtgatcttacgtcctttgcccaacagcaatcacgcgccgcaggctttatcttgagcatcgatgacgaagaatttggctctggaacaccggaagaagcgctggatgcacttgcgaatttacgtaactttgtggctgaaattagacgccgtaatccggacatccctctgtatctttacggagaaacacggacggctagacatattccgaacgatattttgcgggaactgcatggctttattcacatgcatgaagacacacctgaatttgtcgcgcggcatatcatcagagaagctaaatcttatcttgatacgttagcaccgccgtttttcagagccctggtacattatgcacatgacggttcttactcctggcattgtccgggccattccggcggagttgcgtttcttaaatcacctgtgggacaaatgtttcatcagtttttcggtgaaaacatgttgcgcgcggatgtttgtaacgctgtggacgaactgggtcaactgcttgaccatacaggcccggttgcggctagcgaacgcaatgccgcacgtatttttagcgcggatcatcttttctttgtgacaaatggaacatcaacgagcaacaaaattgtttggcattccacggtggcggctggcgatattgtattagttgaccgcaattgccataaaagcaacttgcatgcgattatgatgacaggagctatcccggtttttcttatgcctacgcgtaaccattatggaattatcggtccgattcctaaaagcgaatttcaattggataacattaaaaagaaaattttggccaacccgtttgcaagagaagcactggagaaaaatccgggcgcaaaacctagaattttaacaatcacgcaatcaacgtatgatggaattttgtacaacgttgaagaaatcaaatcaatgttggatggtgaagtggacacactgcattttgatgaagcctggcttccgcatgcatcatttcatgatttttacggagactttcatgcaattggtgaaggccgccctcgttgtaaagatagcatgatcttttcaacacaaagcacgcataaactgttggcgggcatttctcaggcttcccaaatcctggtgcaagatccgcaaaatagacagcttgacacagcctggtttaacgaagcatatttgatgcatacatctacgtccccgcagtacgccattatcgcaagctgcgatgtcgccgcagcgatgatggaacaacctggtggccaggcgctggtcgaagaatctcttgtagaagccttagattttcggagagcaatgcgcaaagtcgatgaagaatatggccatgactggtggtttaaagtatggggaccgaatgaattatctgatgacggaatttgtgatccggcggactgggaattggaacctgatgaacgttggcatggctttgctggaatcgaagaaggatttaacctgcttgacccgattaaagccacaatcttgacgcctggcctggatgttgatggatcatttgaagaaatgggcattccggctgccatcgtaacaaaatatctgacggaacatggagtcgtagttgaaaaaacaggtctttactcatttttcatcatgtttacaattggtatcacgaaaggccggtggaatacgcttatctcattattgcagcaatttaaagatgactttgataaaaaccaaccgatgtggagaattatgcctgaatttgtcgctaaatatccgcagtacgaacgggtaggattgagagaactgtgccaacgcattcatcagctttacagcaaacatgatattgcccgtcttacaacggaaatctacttatctgaaatggaaccggccatgcggcctgctgatgcctttgcaaaaatggcacatcgcgaaattgaacgtgtgccggtcgaagaattagaaggcagagtaacatcagttctgcttacgccttatccgcctggcattccgttattgatccctggagaacgctttaatcgtacaattgttgattacctgagatttgcacaagaatttaacggagaacttccgggttttgaaacggacgttcatggcctggttgcaatggagaaaaatggcaagaaagtttattgcgtcgattgtgtaaaacag

SEQ ID NO: 225 - DNA, 2277 bp, Ralstonia solanacearum
atgaagttccgttttccagtgatcattatcgacgaggatttcagatccgaaaacatttccggctccggtatccgtgccctggctcaggcgatcgaagaggaaggtatggaagtgaccggattgacctcttacggcgatttgacctctttcgcacagcaatcctctcgtgcctctaccttcattgttagcatcgatgacgatgagttcatcaaccctgacaatgataagcctgaaccggaggctgtggagaacttgcgagcattcgtggcagaagtgcgtcgtcgtaatgcggacattcctatcttcttgtacggcgagaccagaacctctcgacacttgccaaacgacgtccttcgcgaattgcacggcttcatccacatgtttgaggataccccagagttcgttgctcgtcatattatccgagaagcgcgcaactatttggattccttgccaccaccattcttcaaagcactgatcgactacgcccaggattcctcctattcctggcactgccccggccattctggcggtgtggcattcttgaagtctccagttggtcaggtgtttcaccaattctttggcgagaacatgctccgtgctgacgtttgtaatgcggtggatgaattgggccagttgctggaccataccggtcccgtggcagcctcggaacgaaacgctgcgcgcattttcggttccgatcacatgttctttgtcaccaacggcacctctacctctaacaagatggtctggcatgctaacgttgcgccgggcgacatcgtggtcgttgatcgaaattgccacaaatccattctgcatgctatcatgatgaccggcgcgattcctgtgttcttgatgccgacccgcaaccactttggaattatcggcccaatcccaaaatccgagttcgagccagaaaccattgctaagaaaatcgcggaccatccttttgcatctcaggccaagaacaagaaaccgcgtattctgaccatcactcaaggcacctacgatggtgtgctttataacgccgagatgatcaagaacatgttgtccaccgagatcgacactctccacttcgatgaagcatggttgccccacgcatccttccatccattttacgaaaacatgcacgcaatcggccacggccgtgcacgttctaaggatgcactggtcttcgccacccagtccacccacaaacttctcgctggcctgagccaggcatcccaaatccttgttcaagactccgagaccagaaagctggatacttaccgtttcaacgaagcatatcttatgcacacctctacctctccacagtactcgattatcgcctcctgtgacgttgcagccgctatgatggaggcaccaggcggcaccgcattggtggaagaatccatcgcagaagccttggatttccgtcgtgcaatgagaaaggtggagcaagaatacgtgggcaccaacggcggctccggccgtggcgatgattggtggtttaaagtctggggtcctaatgacctgtctgatgagggcattgaggaacgagaagcatggatgttgaaggcgaacgagagatggcacggattcggtgacctggctgaagattttaacttgttggacccaatcaaggcgaccatcatcaacccaggcttggatgtggatggcaagttctccgaatctggcattccagcggcaatcgtgaccaagtaccttgctgagcacggaattatcgtcgaaaagaccggcttgtattccttcttcatcatgttcaccattggaatcactaagggccgttggaactccttggtcaccgagctgcagcaattcaaagacgattacgataacaatcagcctctttggcgagttctcccggaatttgtgcgccagtacccacaatatgagagaattggtcttcgtgaattgtgcgacggcatccactccgtttacaaggctaacgatgtcgcgcgtgttaccactgagatgtatctgagcaatatggaacctgctatgaagccgtcagatgcttgggcgaaaatggcacaccgagagaccgaacgcgttgccatcgacgatttggagggccgtattaccgcaatccttctcaccccatacccaccaggcatcccattgctgatcccaggcgaacgtttcaaccgtaccatcgtgcagtatctgcaattcgcacgtgactttaacaagttgttcccaggctttgaaaccgatattcacggcttggtcgaggaagagatcgacggtaaagttggatacttcgtggattgtgtccgt

SEQ ID NO: 226 - DNA, 2256 bp, Taylorella equigenitalis
atgaaatttagatttccgatcgtgatcatcgatgaagactttcgttcagatagcgcatctggatttggcattagagcactggcagacgcgatcgaagaagaaggctgggaagtacttcctgcgacatcctatggagatttaacgtcatttgttcaacagcaaagcagagcttctgcctttatcttgtcaatcgatgacgaagaatttgaatccgattcaccgcaagacgtcgcagaagcgattagaaatttacgcagctttatcaacgaattgagatttcgcaatgaagatattccgatctatcttcatggcgaaacacgcacgtctgaacatatccctaacgatattctgaaagaacttcatggatttatccacatgtttgaagacacaccggaatttgtggcaagacatattatccatgaagcgaaatcctacttagatacgttggcaccgccgtttttccgcgaactggttagctatgcacatgatggtagctactcttggcattgtccgggccatagcggcggagtagcatttctgaaatcacctgttggacagatgtttcatcaatttttcggtgaaaacatgttgcgtgcagatgtgtgtaatgcggtcgaagaactgggccaactgcttgaccatacaggaccggtggctaaatcagaaattaacgcagcgcggatctttcatgccgatcattgctattttgtcacaaacggcacatccacgtcaaataaaattgtatggcatggaaacgttgccgaagatgacatcgttgtggtcgatcgtaattgtcataaaagcattctgcatgctatcacaatgacgggcgccattccggtttttctgcgtcctacacggaatcatcttggtattatcggaccgatccctctttctgaatttgaaccggaaaacattaaaaagaaaattgaagataacccgtttatttcagacgaactgaagaaaaaacctcggatcttaacattgacgcagggcacgtatgatggaattttatacaacgtggaaatgatcaaagaaaaactgggagatacgatggaaaatttgcattttgacgaagcatggctgccgcatgctgcctttcatgaattttacacaaacatgcatgctattggcgccaatcgtcctcggtccaaagaagctattatctacgccacacattcaacgcataaaatgttagctggaatttcccaggcctcacaaattatcgtccaggatagcgaatcaagaaaacttgaccgcaacatctttaacgaatcatttttaatgcatacatccacgtcaccgcaatatgcaattatcgcgagctgcgatgtggcagcggctatgatggaaccgcctggtggcacagctctggtcgaagaatccatcagagaatcaatggattttagacgcgcaatgcgcaaagttgcgtcagaatttggtaaagatgactggtggtttaaagtgtggggaccgcctagacttgtccaggaagatattggatggcagggtgactggttattggaaccggatgcagactggcatggttttgcgaacattacagaaggctttacgatgcttgatccgattaaaacaacgatcgtaacacctggattagaaattgatggtacgtttgaagaaagcggcatcccggcgagcttagtttctaaatacttgacagaacatggaatcgtagttgaaaaaacgggtctgtactcatttttcatcatgtttacaatcggtatcacgaaaggccgttggaacacactgcttacgtctttgcagcaatttaaagatgactacgataaaaaccagccgctgtggcgtagcatgcctgactttatcaaacaatacccgatgtacgaatcttttggcctgcgggatctttgtcagaaattgcatgaagcatatcatcatcgtgacctggcccggattacaacggaagtgtacgtcagcgaaatcgaatctgctatgcgcccgaaagatgcctataacaaaatgacacgtcggcaaatcgaaagagttgatattaacgaattagaaggacgcgtaacagcggttttattgacgccttatccgcctggcattccgctgcttatccctggagaaaaatttaacaaaacaatcgtccagtacctgaaatttgtgtgcgaatttaacgtcgaatttccgggctttgaaacaatggtacatggcctgggaacagaaacgcttcctaacggagaaatccattactacgttgattgtctgatcgac

SEQ ID NO: 227 - DNA, 1545 bp, Cryptosporangium aurantiacum
atgaccgctgttgcgcttccttcaggcgatcgtccggtgctctacgacgcagcacacggctccgctccattggtggatgcgatcattcgttaccgtggctgcgaaaccggcgcgctgcacgtccccggtcatgcaggcggtcgaaccgttggcccaggtttgcgcaacttgctgggctccaccttcttggcttccgatgtttggttgacccctgcagatgcaaccactgctcgtcgagaagctgaggcgcttgctgcgaaggcatggggctccgatgaagcattgttcttgttggatggctcctccggcggcaaccgtgcagtccacctggcacagcaacagaacccaggcgcggatcacgtggtcgttgcacgtgacagccatacctctaccttggctggacttgtgctctccggtgctaccccacactgggtcaccccacgtttggatcagggcggcttcggtatctctttgggaatcgacccaatctccttggatcgagcccttaccgatttggcagccactggccaccgtgcatctttggtgtctatggtgtccccaggctacgcaggagcctgttccgatgtccgcgcactggctgctgttgcacaccgtcatgatgctccgcttttcgtggacgaagcatggggcgcacacttgccatttcatcctgatctgccggagaacgcaatctccgctggcgcggacgtcgctgttacctctgcgcacaagatgctggcagcccctagcggcgctgcgttgattctggtccgtggtgaacgaatcgatgccggccgcattggtagaaccgtccaaatgactcagaccacctctccattgctgccagttttggcgtcgatcgacgaggcacgtcgtactatggtgtcccgtggccgtatcttgttggatcgtaccttggatttggtggcagatgcccgtcgtcgtttggcagccatcccaggtgtgcgtgtcgctgaagcggaggatctgggcgtccctcgcgaaagattcgacccgttgcgtttggtggtgtccgtgcgtggcttgggactcaccggattggcactggagaaattgttgcgtaccccaggcccaggcctgggcacctctggtcttctccaccccgcagttgccgtggaaggctccgatgagtcaaacctgtttgtggcaattaccacttgcacctctccagatgttgtggacgcattggtcaccgccttgcgtactctgtcttgccgtccacgtcgtcgtttgcgtccagcgtgggacggtcaacttgttgctgcgttgctggcacctcgtgaacaggtgtgcaccccgcgagaggcacacttcgcagcaaccgaaaatatccccttggagcgtgctgtgggaagaacctctgctgaacctattaccccatatccacctggtgttcccgctgtgatgccaggcgaacgtttggatcgtgatgctgttgctgcgctggagcgtgcagtgtccaccggaatgcacatccacggcgcagccgatccgacccttgcaaccgtgtccgtgctccgtgac

SEQ ID NO: 228 - DNA, 2130 bp, Candidatus Sodalis pierantonius
atgaatattatcgcgattctgcttccggaacatgtattttataaagctgaacctgttagagaattggcacaggcgctgacggaccaaggttatcatattgtgtacccgtctggctcccaggatttattgacactgcttgaacaaaaccctcgcatcgcaggaattatctttgactgggaacagtatggtatggatctttgcttggccatcaacgaaatcaacgaatatttgccgctgtacgcatttatttcaacacatagcgtgctggacgtctctgcgaatgatatgcgtatggctctttatttctttgaatacggcttaaacgcagcggctgacatttcacagcgtatccggcaatatacggcagaatacattgatgcgatcatgccgcctcttacaaaagcattatttcattacgttgaagaaggcaaatacacgttttgtacaccgggtcacatggcaggcacggcgtatcagaaatctcctgtgggctcactgttttatgatttctttggcggaaacacattgaaagcggatgtatcaattagcgttacggaactgggctcactgctggatcatacatcaagccatcttgaagctgaagaatatatcgcccgcacgtttggcgcagaacaatcttacatggtgacaaatggaacgtctacatccaacaaaattgtcggaatgtatgcttcaccggccggcagcacggtacttatcgatcgtaattgccataaatcattagcccatctgcttttaatgagcgatgttgtgccgatttatttgacacctagccggaacgcatacggcattttaggtggcatcccgcagagacaattttctcgcgcatgtattgcgcagaaagtcgccgcaacaccgcaagcctcatggcctgtacatgcagttatcacgaatagcacgtatgatggattgctgtataacacgcagtacattaaacaaacactggcggtgccgtctatccattttgattccgcttgggtcccgtatacgaattttcatcctatttaccgtggaaaatctgacatgtccggtgaacggacaccggataaagttatctttgaaacgcagtcaacacataaacttttagcggctttttcacaagctagcatcatccatatcaaaggcgattatgacgaacttacatttaacgaagcctacatgatgcatacaacgacatctccgcattatggaattgtagcatccatcgaaatggccgcagcgatggttagaggaaaacctggtagacgcttgattcagcgttcaatcgaaagagcactgcattttcgtaaagaagtttatcggttgctgcaggaaagcgaaggctggtttttcgacatttggcaaccggaaattatcgaagatgccgtgtgttggcctgttgaacctggagcaccgtggcatggttttcgtgatgctgacgccgatcacatgtatttggacccgattaaagtcacgatcctgacacctggcatggatgaaacaggagaaatggcttcagaaggaatcccggctagcttggtagccaaatttctgaatgaacggggagtcgttgttgaaaaaacaggtccttataatctgctgtttctgttttcaatcggtatcgataaaacgaaagcgatgtccttgctgagaggattaacagaatttaaacgcgcttatgaccttaatttaagagttcgcaacatgcttccggatttatatgcggaagaccctgatttttaccgtcacatgcggattcaggatctggctcaaggcattcatggacttatcagacaacagcatttaccgcagttgatgctgaatacgtttgcggtgcttccggaaatgaaaatgacaccttatgctgcctttcaacagcaagttagaggcaatgtggaaacagtcgaattatctcaaatggtgggacgcatttccgcgaacatgcttttaccttattcaccgggcgttccggtggtcatgccgggagaaatgatcacagaaggatctcgcgctgttctggattttctgctgatgctgtgttcaattggtcaacattatcctggctttgaaacggatattcatggcgccgaattaacagatgacggaagatactgggtacgcgttctgaaa

SEQ ID NO: 229 - DNA, 2130 bp, Candidatus Sodalis pierantonius
atgaacatcattgccatcttgctgccagaacacgtcttctacaaggctgaacctgttcgtgaattggcacaagccttgaccgaccagggctaccacatcgtgtatccaagcggctcccaagatttgttgaccttgctggaacagaaccctcgaattgcaggtatcattttcgactgggagcagtacggaatggatctgtgccttgcgatcaacgaaatcaacgagtacttgccattgtatgcattcatctcaacccactcggtgttggacgtctccgccaacgatatgcgtatggctttgtacttctttgaatatggcctgaatgcagccgctgacatctcccaacgtatccgtcagtacaccgcagagtatatcgatgccattatgccacctctgaccaaggcccttttccactacgttgaagagggcaaatatactttttgtaccccaggccacatggcaggcaccgcataccagaagtcccccgtgggttccctgttctatgacttctttggcggtaacaccttgaaagctgatgtgtccatctccgtgactgaactgggctccttgttggatcacacctcttctcacttggaagctgaagagtacatcgcgcgtacttttggcgcagagcagtcctatatggtcaccaacggcacctctacctctaacaagatcgttggaatgtacgcttctccagcgggctccaccgtgctgattgaccgaaactgccacaagtccttggcgcacttgttgcttatgtccgatgtggtcccaatctacctgaccccttcccgcaatgcatacggcatcttgggcggcatcccacaacgtcagttctcccgtgcatgtatcgcccaaaaggttgcggcaaccccacaggcatcctggcccgttcacgcagtgattaccaactccacctacgacggtctcttgtacaatactcaatatatcaagcagaccttggccgtgccgtcaattcacttcgattcggcttgggtcccatacaccaactttcatcctatctatcgcggtaaatccgacatgtctggagaaagaacccctgataaggtcattttcgagactcaatccacccacaaactgcttgccgcattctcccaggcatccatcattcatatcaaaggcgattacgacgaactgaccttcaacgaggcgtatatgatgcacaccactacctctccacactacggtatcgttgcaagcattgaaatggcagcagcaatggtgcgtggcaagccaggccgtcgtttgatccagcgctccattgaacgtgcattgcacttccgcaaagaggtgtacagactcttgcaagaatctgagggctggttctttgacatctggcagccagaaatcattgaggatgcggtttgctggccagtggaaccaggcgcaccttggcacggcttccgtgatgctgacgcggatcacatgtaccttgacccgatcaaggtcactattttgaccccaggcatggatgaaaccggcgagatggcatccgagggcatcccagcatccttggtggcaaagttcttgaacgaacgtggtgttgtggtcgaaaagaccggcccatacaacttgttgttcttgttctccatcggcattgataagactaaagccatgtcactcttgcgtggtttgaccgagttcaagcgagcttacgacctgaaccttcgtgtgcgaaatatgctgccagatctttacgccgaggaccctgatttttatcgccacatgcgtatccaggatctggctcagggcatccacggtctgattcgtcagcaacacttgccacaactcatgttgaacactttcgcagtcttgccggaaatgaaaatgaccccatacgcagcgtttcagcaacaggtccgcggcaacgtcgaaaccgttgagctgagccagatggttggtcgtatctccgccaatatgctgcttccttactccccaggcgtgccagttgtgatgccaggcgaaatgattaccgagggctcccgtgcagtgttggatttcttgttgatgctttgttctatcggacagcactaccccggctttgaaactgacatccacggcgctgagctgaccgatgatggtcgttattgggtccgagttttgaag

SEQ ID NO: 230 - DNA, 1821 bp, Unknown
  Description of Unknown: Candidate division TA06 bacterium 34_109 sequence
atgaacttgatcaactacgatttgattgtggtcaccgatgacaagaaaaagaaagcaaagtacaacttccttaacggcgaagaagtgttgttcaaccacacccgtttccgtatccgtttgatcaacaagttcatctactccgaaactggtctggatcgtcttatgtatgacggcgtgatcgtcgatgttaagcagttcgaagatgacatcattaacaccttgctgttttacaacaatcaatccgagatcttcattttcgactacaagttcaaaccgaacatcgctaaccgaaacaccaagtacttctacgaattgtcccacttgaaggatctgatcattcagttcttttacgagcgtcgatataacaccccattctttaatgctcttaagcgactcgcgcgctctaagaaacaacgttggcacacccctggccatgttggcggtgaagcgttcgagaagtacacctctgtgcgagacttcaagcgtttctacaagaacaacatctttttgaccgacacctctgtgtctgatccatccttcggctccttgctctcccacaactctgtttttaaagaagctgagaagttgttgtccaccgcatacggcaccctgtattccttcatcaacgtgcacggcacctctacctctaacaagatcatttttatgaccttgttggataagggcgacaaggtcatcgtcgatcgcaacattcacaagtccaccatccattccatcattgtttctggcgcattgccgatcttcctgaaagccaacttcaatcgtgaatttggtatcattttgcccacccgaaaggaagaggtgctgcgctgcatcgaagagaacaaagacgctaagttgctggcgttgaccgtcccaacctacgatggccttagatataacttgccagaaatcatttccttggctcaccgttacaagatcaaagttctggtggacgaggcatggggtgcccacatgcatttccaccatgattactatcctgacgcactgcagtctggtgccgattacgttgtgcagtccacccacaaggtcatgggagcattctcccaggcatccgtgatccatgtcaacgataaggacttcaaggaaaagaaatacgagttcttcgagaactatatgttcttctcttccacctctccattctaccctatcgttgcaagcattgacgtgtcccgtaagttgctctcatgtgaaggcaaaatgatcttggagaaggtgaagaaatactatgaacagctggtctccgagattgatgcccttaacgacttcaaagttttgaagagatcttacctgaaagattactatcaagacaagaacgaaatcttgctggattacacccgtatcttggtgaatttctcaaaggcaggaattggcaagaaacagatctactcgtacttgttgaagaacaagattgtcgttgaaaagatcaactacaattccttcaccttgctgcttggtgtcggcaccactcaaaacatggtcaaacgattgatcaaagttctgaaggacttcaaatacgagaagcgcgatttggaagagaagtctatccagttcatttggaacgatctggaagctaccatcccaccttttgaggcgtaccaaagcaagggagaatggatcgagttgaaaaacgccaagggccgtatctcctccaatatgttggtgccatacccaccaggcatcccactgatcattcccggccagattttcaccgaagacctgatcaacaacttgttggaaattacctctttcgatgaaatcgagattcacggccttatcaagggtaaagtcaaggttctgaag

SEQ ID NO: 231 - DNA, 7245 bp, Plasmodium falciparum
atgaagttgtccaatgatccaaacttccagatcgatgaggactctctgcacatgaacaacatcgaccaaaacaaaatcgaagaggacgtgatccctgattcgaaggcagtttccgattacaacgtgaacaatcaggaagtccagcgtaagtccttgtccttgaaggaagacgagaaaatgcgtatcaactccgtgggtgtctacaaggtgaaacgcgaagagtacaagaacaatatgcacccacgtaacgtccagcagaagaacatcaatcagatgtacaagcaatacaagaacatcaacaccaaggtctacgatgaaaacattgagtaccatcgtaaaaactatgaagagaacttgtatggctccaccaagtatgaccgaatcgaagaattggaaaactatatcaacatcaacaatgttacctctgtgtgttcactgcgtatcaagttgtgggaggcgttgctgctttacgttaacaacttgaacgtggagttcatctactttatcatttcctgcttgaaggaaattgaggtgtactggggtcaggaagcaaccgagaaccttcacgaaatcatcaacttgatcaacgataagaaatacaaggaagtgtccaacaaaattcgtgaaaccttgtcctccttgtccgtgaccactggcaagatcactgacgagaacccattcttttacaccttgattgtgtcctccaaacgtgatgaaaatcgatccaactccactaacaattattccgatttgacctgcgagttgaacaagatcctgcagtacgaacacaaccgccttagcaaccaaattaacaacaagaccttggaatacaagatcattgaggtgtccaacgcacgtgaagcattgttggcatgcttgatcaacccacagattctgtccgtggtcatcgtggacaacttgaatattgatgaagaacgtgtcgaagagaaggacatctacaactactacaacgatgaaaacaactccgtccgaaaccactctgttgcaaactcctacgtgtataactcctccatcgtcaacaatgttcacatgcctattaacaagtccaacatgaacaatatcgctctgaacgctctggcgcttaacaacaaggacatctacatgaaaggcatgatgggcacctctcgacaccacaacaataataacaacaacaacaacaacaataataacaataacaataataataacaataataataataataacaacaataacaacaacaataacaacaactccggcgttaacgatttccgaaagaacaaatcatacaactactcgaacaactatattaataacaatatgaacttgaacaagtataacgactccaacaagaaaaacatcattaacaacgtgaacaacttgaacaacatgtataacttgaataatatgtataacatgtacaacatctgtaacattaactacaacaacgataacatctgccaccatcagtttaaggagtacaaattcaacattgccgactttgtgttgggttatgtgcaactggtctccgctccacttgaaaagatgaagaaaggcttcaacagcttggtcatcttgatcaaatcaatcgcgtacattcgttcctccgtggacatcttctgcgtttgtacctctattaccttggattcgcttcagtccgtcaacaatatgatcattagaatcttcaccactcacgatgaccattccgatttgcacgagtctattttggatggcgttaagaaaaagatcaaaaccccgttctttaacgcattgaaggcatacgccgaacgccccattggtgtgttccatgctctggcgatctccaagggcaactccgtgcgtcgttcccgttggattcagtccttgttggatttctacggcgtcaacctgtttaaggcggaatcctccgctacctgtggcggtctggactcgttgttggacccacacggctccttgaaggatgcccaaatcatggcagcccgcgcttactcctctaaatattgcttctttgttaccaacggcacctcttcttccaacaaaatcgtgatgcaggcgttggtcaagcccggtgacatcattctggtcgatcgtgcatgtcacaagtcccaccattacggattcgttctttctcaagcctttccatgctacttggacccatatcccgtgtctaagtacggaatctatggcgctgttcctatctacgtgattaaaaagaccctgcttgaatatcgtaagtccaacaagttgcacttggtccgactcatcattttgaccaactgtactttcgatggtatcgtttacaacgtgaaacgagtcatggaagagtgcttgtccattaagccggacctgatcttcctttttgatgaagcctggttcgcatacgcctgctttcaccccatcctgaaattccgcaccgccatgactgtggctgaaaagatgcgctccaccgagcagaagcgtatctacgaaaagatccataagaagttgttgaaaaagttcggcaacgtgaagtctcttaacgatgtcccagaagaggaactgcttaaaacccgtctgtacccaaaccctaatgaatacaaggttcgagtgtatgctactcagtccatccacaagtccttgacctctttgcgccaaggctccgtgatcttgatctccgatgacaacttcgagtctcacgcgtataccccattcaaggaagcatactatactcacatgtctacctctcctaactaccagatcctggccacccttgatgccggccgtgcacagatggaactggagggttacggcttggtggaaaaacagaccgaggctgcattcttgatccgcaaggaattgtccgaagatccaatcatctctaagtacttccgtatcttgaacgctgatgaccttattcccgaccgtctccgacaatgcaccgtctcctacatgaagcgtaagcacgtgaacaacaacaacaacaagaagaagaacaacggcgatgacgatgacaacgatgacgataacaacaacgacgataacaacaacaacgacgatgacaacaacaacgatgacgataataacaatgatgacgacaataataacgacgatgataacaacaacaacaacgacatcaaccacgataacaatcacaacaatcataacaatgtgggtaaccagaagaaatacaacaactcattgaactcccgttgctccgcggatgaagacgcaaccggctcctacatctttaacaacaacattaaggaaatcgaggataacaccgagagcgcgcacaaaattccaatcgaatacgtggacggcaagttgttcaacgtcatcaaatacccacacgaatatatgtcagaggataactcgcctaataacattcataccaacctgcaaaagtccaacatgaagttgttgaacgacaataacattgaagtgggtcgtatcttggaatcctctaactgtttcaagtattctcacaacgttaatatgtgcaacgtgttgatcaacaactcctcctaccgtaataactctgacaacaagaaagatggctccgagaagcgatacgtgtatgatgaatacaacgaatccgtgaaagaatattcccctaacgacgatactaactacgacgcaacctacaagggctatgtgaacggtcacgtcaacgttaatatgaataacctgatgaacggcgataacaagtgcgattggtacgacaccaacgattgtgacgataacaagaatatctactgcgacaaagcgaataacatctactattacggcaataactacaagtccaaagaggaaaagcgtaagaaagcaaactatggctccgtgaactccatctgctgcgactcaacttactgtatggatacctctgacgataacttgtcctccaacgaatgctcctcctacatcgacaacaataataataacaacaacaataacaataatattaacaataactccaataacaataacagctgctcaggtgacatgaagaactttctggaatacttcgagcgttcatggctctcggaagacgagttcgtgttggacccaacccgaatcaccttgttcaccggttattccggaattgatggcgacaccttcaaggttaaatggttgatggataaatacggcattcagatcaacaagacctctatcaactctgtgctgtttcaaaccaacattggcaccactggctcctcctgcttgttcttgaagtcctgtttgtccttgatctcccaggaattggatcaaaagaaatccctgttcaacgagcgtgaccttaaccagtttaacgaatctgtctacaaccttgtttacaactatatcgatttgtccgtgttctccgcctttcacccgctgttcaagaaacgctacgaggacaagaacatcttcaacaacgaaggcgatttgcgtaaagccttctacttggcttatgaggaagattacgtcgagtatatcctgcttaataacttgaaggaccgtatccgtcacaaagaaatgattgttgcagcctccttcatcattccctacccacctggttttccggtgttggtgccaggccagatcatttctgaggaaatcgttaactacttgagcggcttgtccgtgaaggagatccacggctacgatgaaaacattggcttccgttgcttctacaacttcatcttggactactacgaaaccattaacatcaatgatccatactccatgtatcagcctatggacaagcgtctttacgaacaactcaaggagaaatatctgcactccaagaaagaccttcacgatcatcgactgtctaacctttacatgtacgataaggaaaccatgaagatgaagaaagtttacatccacaacaacggctcctattccgtggacccatacggttatatttccgatctgaacgaggaagagggcgttatcattaacgcgcagcatgtgaataacaagaaagacatcttcttccacaacaagcgtgagaacaaaatccacaataataataataataataacaagaagaagacccacgttaacaacaagagcgatgtgatgatcattatcccgtcagaagaccacttgaacccacacattatccataagatgagcgataacaatcgtaagattatcaacaccaagaactataacaacattatcaactacacctctaacatcctgaacaacaagcaggatcacgcattttacaactctggctccccacgtacctctgtgtgctccaaccacaagaacatcaataccaacggcatgttcaacaacttgatgcataaaaacgatgagcgtggtaacaacaagtcaatgtcgaagcacgaaaagaacaatcattccctgtaccttactaacggagtcaacaccaagtcccacaaaaagatgtacatcgagtcctataaccctaagggcgaccgtgaattggatttccagaacaaatccaccatgtacaacaatatggacgatgtcgcctaccacggcaagcactatcatagcgttaaaaaggacattatcaacaacgatacctctttgaaggagaaccgttacaacaagaacatcatgtcctgcaagaccaacaataacaccggcaccaactccaagaacgagcgtaagaagaagaagtccttcggcatccacatgtccttgtctccgaacaacaatcacctgaagggccatgacacctctcgatacagcgattcaacctctatctgcgaggataatatcaacgacgataacattgacgataccggacacaaaaagatggacgctatcgatggccataacattcgaaacaaaaagtccgacatcaaggaaattctgtacaacaataacgataacgacatctacggcaacgcgtgcgacgtgatcgcttgtaaggagaacatgtacatcaacgaaaaggactcctattctgatgttgtgttgatcaagcgtaataacaagatcaacaagaacgatggaaactactactaccacaacaacttctctaacaacagcaagcattcaaacgtcgttcccatcctgaacaaaggcaacgtcctcttgaataacaccaacgttaaaaagaacgactactgcgtgatccagaaggataacaaaatcatgtctcgaaacaacatgtccaccaagtacgcctcctctaacgaatacaacaaaaagaaagaagagggcgcttactattccgattcctccaagaacatccacgataacttgttcttgaagcgcaaagaaaatgagaacatcgaacatattaccaaggatgtgatgaagaaaccgttgatcggttacaacaaggaagagatcaagaaaattaacgagttcctgaaaatcaaccgtcgtattgcagacgaacacatgggcgatattcagatcaagttggatgaagagatcctggagcgaaaagaagaggacatgtacgataacaagaacgacatgttcaatgtcaacatcaagtcaaacattgaagacgttgcggataactccccacagatgaacatcgacaagaaagatattatcgttttggcatccaacaacaactactgtgacatcaataataataataataataataataattgtaactacgtgaagaaatgcgaaactaacaaatgtgacatctacatcaccaaggataacctggaagagatccagaagaccaatatgaacattaagaaagacgtggaacacgacatcggcgagtacaacttcgattccgtgatcaaccagtccgtgaacaacaacatcaacatcctgatcgacaagtataactgtaacaacatcaagaaacttaacaacagcaacatttgcgagaacaataacctgctttcaaacgataataactacatcgtgaaccacaaggtctactcctccatcgaaaacaccaacactttgaactgcaacaacattaagaccgataacaactcaaataacaataataacaatatgccatacaaggagaacaaggtgcgtggcttgattatctgcgaaaacgacatcaacaagaacactggccgtcagctcaacaccttgaacaacaactcctacatcaacaacttgatcactaacgtggatgatgacacctttgttcaccgtgagggcaacttctttctgcagtgtgagttcaccaactccgacatcaattgcaacatgtacgaaatggagacctctttgaacaacatctgcaccaacttgggcggcgtgatcatcaagaacaatatggaatacgatgactgcgagaccaagcacaaa

SEQ ID NO: 232 - DNA, 1233 bp, Oligotropha carboxidovorans
atggtggcgtcgccttcctgcgacatggcaggcttcccaggctccgaaatcatttctttgagcggttcctctcagggccgttgggaatccgcaatgaccgatcgcatccaagagtttcttagagaccgtcgatctaagggcttggataccgagccctgtcttgtggtggatttggatgttgtgcgtgacaactaccagaccttcgcaaaggccttgccggattcccgtgtgttctacgctgttaaagcgaatccagcacctgaagttttgaccttgctggcatccttgggctcctgcttcgacaccgctaccgtgccagaaatcgagatggctctggcagctggagcaaccccggaccgaatctccttcggcaacaccatcaagaaggaacgcgatgtcgcacgtgcatacgcattgggtattcgtctgtttgccgttgattgcaccgctgaagtggagaagatcgcccgcgctgcgcctggcgctaaagttttctgccgtatcttgtacgactgtgccggtgctgaatggcccttgtcccgtaagtttggatgtgatccagagatggccgttgacgtgttggatttggctaaaagattgggcctggaaccagtcggcatctccttccacgttggctcccagcagcgtaaggtcaaggcatgggaccgagcgctggcaatggcctcccaggttttccgtgattgcgcggagcgaggcatcaaccttactatggtgaatatgggcggcggcttcccaactaagtacttgaaagatgtcccacctgtcgttcagtatggtcgttccatcttccgtgcccttcgaaagcattttggcaaccaaattcctgaaaccatcattgagccaggccgtggcatggtgggaaatgcgggcgtcatcgaagcagaggtggtcctgatttccaagaaatctgatgacgatgaaaaccgctgggtgtacttggacatcggcaagttcggcggtctggcagaaactatgggcgagagcatccgttatcaaattcgcactagacacgatggagccgaaatggctccctgcgttttggcaggcccaacctgtgactcagcagatgtgctgtacgagaaggccccgtatccccttccagtgaccttggaaatcggcgataaagtcttgattgagggcaccggagcatacacctctacctactcctccgtggccttcaacggcatcccgcccctgcgtacctaccatatt

SEQ ID NO: 233 - DNA, 1533 bp, Synechococcus sp.
atggtgctgagccacctttcaaaggcatcccgtcgtttgcgtttgctggatcgaaaagctcaggaacgcgcgcccttgttcgaggcaatccgtcactactgctccctggataaggccccatttcacacccctggccataaacaaggacgcggcattccggcagatttgcgtgccttcctgggtgaaaacgtctttcgtgccgatttgaccgaattgccagaagtggataacttgcacgatccggacggcgtgatccgtgaagctcaggagctggcagccgctgcgtacggtgctgaccgaagctggttcttggtgaacggctccacctgcggtgtcgaaactttggtcatggcagtctgtgatccaggcgacaagatccttctccctcgtaattgtcacaaatcggcaatcgcaggcgtgatcttgtccggcgccgttccagtgtatattgaacctgatttcgacctggagcttggaatcgcacacggcattaccccagccggccttgaacgtgcattggcggagcatcctgatgctaagggcgtgttggtggtgtccccgacctactatggagtctgctgtgacctggaagcgcttgcagccatcgcacacgcacacggcttgcccttgttggtggatgaggctcacggtccacacttgggattccacccggaattgccattgtccgcgctggaggctggtgctgaccttgttgtgcagtccacccacaaggtcatctccggcatgactcaagcatctatgctgcacttgaaaggttcccgtatcgatcccaaccgtgtgcgtaatattttgcagcttctccaatccacctctccaaactacgttttgatgatgtctctggatgtggctcgtcgtcagatggcgttggaaggtgaggtcttgctgggacagaccctcactttggctgaccaagcacgtgcccgactgaaccgtatcccaggcattttctgctttggtcccgaaagaatcggctccaccccaggcttcttcgatcttgaccgcactagactcaccgtcaccgtgtccggtctgggcttgttcggctttgatgcgcacgactgggtcaacgatcacttccatgttcagccagagatgtctaccttgcataacgtcgtttttatcatctccttgggcaatacccaacgcgacatcgaccgtttggtggaatccgtggctgcgctgtcagagcaggcacaaggttcccagccatccttggctttggcggaaaagttgcgtcgattggcccaactgaaacgtccacctcttccgccccagcgtttgtccccgcgacaagcattctttgccccgatcgaacgtattcccttccaggaagcagtgggccacatctgcgcggaaatcattagcccttacccaccaggcatcccaattctggtccccggcgaagaggttacccaggaagcagtggattacttgttgttggttcacgaagccggcggttttattaacggcccagaggacgtgcgtcttcaaaccctcaaggtggtcaaaact

SEQ ID NO: 234 - DNA, 1611 bp, Paenibacillus alvei
atggataagcataaagaaacctctcagctcgccttggctggccaagaacacgtgcgcgctcctctggtcgaggcgttgctgaagtacaaccagaatcaacacgcttctttccatgtgccgggtcacaaggacggcaagtggtacgcgcacgaatccctgtctctttccggccgtgaggattggaacacccttctccacaaaatgtccttgctgcttaccatcgacgtgaccgaagtggagggcaccgatgacttgcaccatcccactgaagcgattgcagaggcccagcaactggcagcccagtgcttcggcgcagaagaaacccactttttggttggcggttccaccgtgggtaacatcgcattgttgatgtcttgctgtattcagccgaacgatgtggtcttggtgcaacgcaatgtccataagtccgtgttgcacggcttgatgatggctggcgcacgtgcagttttcttggcaccacagatggataaaggttccggcttggccaccgctcctaacaatgacactgttgaacaggcactgcaagcctacccgaacgcgaaggcactttttgtgaccaaccccaattactatggcatgggcatcaacttgtgtgaacttgcagagatggtccaccgatacgatattcctctgcttgttgacgaagcacacggcgcacactatggtttgcacccagcattcccagagagcgccctgcaggctggagctgatggagttgtgcagtccacccataagatgttgggcggcatgaccatgtcagcaatgctgcacgtccagggcgcccgtcttaaccgtacccgattgaagaagttgttgactatgctgcagtcctcctccccatcctacccattgatggcatccttggacatctcccgttactatttggcacgcaacggcagagaagcctttgaagagggtctgaaggctgttcagcacgtgcgagctgcgctcgtcaacttgaccgtctacgaagttatcgagattcagaccgctaagccacaatcggcgtactgctccttggacccattcaaggttaccatccgttgtactaacggacagttgtcaggctacgaactgcttgagcgactgtcggaatatggctgcaccgcagagatggccgatctgcaacacgtcgttttgtccttctcccttggctcctccttggaagacgctcagcgtttgatcaccgcgctgcaagcggttgcagtgaccttggatgacaacaccccgtacactaagattcaggtggctacctatactgaaaatatcgataccccaggccgttccattactttcgcggacggacagagaatgtactctgagccagtgtccttttctatctatgaacaagagtctgtccgtaccaagcgtgtgtccgtgcatgaagcagtcggccacaaagcagccgagtccgtggtcccatacccaccaggcatcccactcttgtatcccggcgaaatcattaccgaggctgcggcacaggaactgattatgcttgcccatgctggcgcgaagtgccacgatgccgaagacgagtccctgcttaccgtgcgtgttgtggtcactgaagatgagaaaggtatcgaggac

SEQ ID NO: 235 - DNA, 2133 bp, Plesiomonas shigelloides
atgaatatcgtggcgattttgtctaacgtggatgcctacttcaaggaagctccactgcaggaacttgatattgagctgcaaaaacgtggctttcacgtgatctatccgtccgacgcagccgatttgctgaaggtcatcgaaaacaacccacgtatctgcggtgtcattttcgattgggacaagtacggcttggatttgtgtaaagacatctccgcaatcaacgagaacttgcctctgcacgccttcgctaacaataactcagtcttggacatcaagctgggtcaccttcgtctcaacttgtccttcttcgaataccacttggacatcgccgatgacattgctctgaagatcggccagaaacgtgacgagtatgttgatcgtatcttgccaccattgaccaaggcgttgttcaaatacgtgcacgatggcaagtataccttttgcaccccaggccacatgggcggcaccgcatacttgaagtcccccgtcggctccatcttctacgacttttatggagcgaacaccctgaaggcagacatctccatttctgttgcagaacttggctccttgttggatcactctggcccacataaagaggccgaagagtacattgctcgcgtcttcaacgcggatgcatcgtatatcgttaccaatggcacctctaccgccaacaagattgttggcatgttttccgctcctagcggctccaccgtgttgatcgatagaaactgtcacaaatctctgactcacttgatgatgatgagcaatgtgaccccaatctacttccgccctactagaaacgcatacggcatcttgggcggcatcccacagtccgagttcaagcgtgaaaccattgaggcaaagatcaaaaccaccccaaacgcgcaatggcccatctacgcagtggtcaccaactccacctacgatggcttgctgtataacaccggtttcattaaggacaccttggatactaaattcatccactttgattcagcctgggtgccatacaccaactttcaccctatctaccagggcaagtatggaatgtccggcggcggcatcccaggcaaggttgtgtatgaaacccagtccacccacaaacttctcgctgcgttctctcaggcatccatgatccacattaagggcgatgtggacaaagaaatcttcaacgaggcgtttatgatgcacacctctacctctccacactacggcattgtcgcatccaccgaaaccgcagccgctatgatgaagggcaacaccggtcgcgcgttgatcgatgcatccgtgcagagagcggtgcgtttccgaaaagaaattaagaaactgcgtgcagagtcagacacctggttctttgatgtctggcagccagacgaaatccaagatgccgagtgctggaacttgtcccctaacgacaagtggcacggcttcaaagacatcgacgctgatcacatgtacttggacccaatcaaggttaccatccttaccccaggcttggataaagatggcaacttggaagaaaccggtatcccagcggcattggtgtccaagttcctggacgaacagggcatcattgttgagaaaaccggtccatacaacatcttgttcttgttctccatcggcattgataagcctaaagccatgcaattgctgcgtggcttgaccgacttcaagcgtggctacgatttgaacttgaaggtgaaaaccatgctcccatccttgcacgccgactccccacacttctataaggatatgcgaatccaggaattggctcaaggcattcacaagttgaccatcaaacatgatttgccaaagatcatgttccacgcctttgaagtcctgccccagatggttattccgccctaccaggctttccaagaggtgcttcagggtaacaccgtcgaagttccgttggaggatatggtcggcaagatcaacgcaaacatgatccttccctacccacctggtgttccgctcatcatgccaggcgaaatggttaccgaagagtccaagccagtgttggagttccttaaaatgttggtggaaatcggtcgtcactacccaggctttgaaaccgacatccacggctgtcacccacacgatgacggtcgttatatggtgtccgtcctgaagcga

SEQ ID NO: 236 - DNA, 873 bp, Candidatus Accumulibacter sp.
atgaatctgcgcgatcatgttgcagcgcatccgctgcttagacgccattttagatttctgaccgtcactgatttagtacctgaagaatttcgagaatcacaagtggaatcactgtataatattgatacgggatgggcaaacttattgaaagcgtggcgctttgatgaatttgctctggacccgtctcgtgctaccctcgccattggcctgactggaatggatggtgacacaatcaagaacaagtaccttatggataagtacgacattcagatcaacaagacatcaagaaacactgtgttatttatgacgaacattggcacaacgagatcaacaatcgcatatctgctgggcgttcttgtgaaaattgctggtgatgttgacgaacgtgtggccgatatgtcaacaccggagagacgcattcatgacaagcgagtcagatcactgacactggaactgccgccgctgcctaactttagttgcttccaccaagcatttagaggcagatcactggatggtcgtacagaaacgcgggatggagacgttagaagcgcatttttcctggggtatgaagatggcaattgcgagtaccttacaatggaagaaacagctcaagccattaaaaacggtagagaatgtgtttcagcacagtttgtgattccgtatccgccgggcttccctatcctggttccgggccaagtaattagcgcagaaatcttgcaatttatgcaagcactggatgttcgagaaattcatggctttaggccggacttaggcttcagaatctacacagaagctgcactggaacaagctggacaggcaaatgcggtctggaaagcccaaatcaactctacagcagcgcaggtagaatccgag

SEQ ID NO: 237 - DNA, 1533 bp, Synechococcus sp.
atggttctgtctcatctttccaaagcatcaagaagactgagactgcttgatcgcaaagctcaagaacgtgcccctctgtttgaggcaattcggcattattgctctcttgataaagcgccattccatacgccgggacacaagcagggtagaggcattccggcagaccttcgcgcgtttttaggtgaaaatgtgttccgtgcggatttaacagaattgccggaagttgataaccttcatgatcctgacggtgtcattagagaagctcaagaactggcagcagcagcgtatggcgccgatagatcatggtttttagtgaatggtagcacatgcggggtcgaaacgttggttatggcagtgtgtgatcctggcgacaaaattttattgccacggaactgtcataagtctgcaattgcgggtgtcatcttatccggggcggttccggtgtacatcgaacctgattttgatctggaactgggcattgcacatggaatcacaccggcgggattggaaagagcactggccgagcaccctgatgctaaaggtgtacttgttgtgtcaccgacatattacggggtttgctgtgatctggaagcactggcagcgattgcacatgcacatggcctgccactgctggttgatgaagctcatggtccgcacctggggtttcatccggaactgcctcttagcgcactggaagctggagccgatttggtcgtacaatccacacataaagttatttcaggcatgacgcaagcatcaatgttacacttgaaaggatcacgcattgatcctaatagagtccgcaacatcctgcaacttttacagtcaacaagcccgaattatgtactgatgatgagccttgatgttgctcgtcggcaaatggccctggaaggcgaagttttgctcggacaaacattaacactggctgaccaggcacgtgcgcggcttaaccgcattccgggcatcttttgcttcggaccggaacggattggctcaacaccgggctttttcgatttagaccgaactaggttgaccgtcacagtttcaggccttggattatttggcttcgatgcccatgactgggtaaatgatcattttcacgttcaaccggaaatgtcaacactccacaacgttgtgttcatcatctctttgggcaacacgcagcgtgatattgaccggctggtcgaaagcgtagctgccctttctgagcaagcacagggctcacaaccttcattggctctcgccgaaaaacttagaagactggcgcagttgaaaagaccgccgctgccgccgcaaagactttcaccgagacaagcatttttcgcgccaattgaacgtatcccgtttcaagaagcagtcggccatatttgtgccgaaattatcagcccgtatccgccgggcattccgatcctggttccgggcgaagaagttacgcaagaagcagtcgattacctgcttttagtgcatgaagcgggcggatttatcaacggaccggaagacgtcagactccagaccctgaaagtcgtaaagact

SEQ ID NO: 238 - DNA, 1383 bp, Alkalibacter saccharofermentans
atgaaatcccgtttatacttgaacatcgaatcaaagcggaagaatgcaaactttcacatgccgggtcataaaagcagagattttaccaaactggggtgggaatacttcgatacaacggaactggaaggcacagacaacctgaataaccctcaaaaagaaattcgagaaatcgagaggcagatttcaaaaagctatgcgagcaaggaatgcattatctctgtgaatggctcaacatcactgattatggctggcatcatgggatcttgccgagaaggagattgtgtcgcggtagctagaaattcacataaaagcgtcttttctgcgatctattacggcagactgaaaacactgtttatcgatccggtgttggaccctatttatggttaccctgtcgggatcgatcttaaacatttagaagcggaactgcgtaagacacgtgttcgggctttggtgatgacctatccaacttattacggaacgtgcgatgacttaaatgctgtcaaacatatttgcgatagccatgacgtcctgcttatcgtagatgaagcacatggcgcacattttaaacattcaatggaatttccgccgtcatcaattgatattggagccgacattaccatccacagcactcataaaattctgtcatcactgaatcaaggcgcagttctgcacgtgaaatcagatcgggtagacatggaaaacatcagaagacacatggcgatgttgcagacatcatcaccttcctatccaattatcctgtcagttgaagaagcagtgaagttcatgaacgaaaacggcgagaaaaaactggaaaagatccaaggattctacgagagagttaagaaagcactggaaggaacaaagttcacgctcatccatgataaaatttcaagagaaatcctccaggtagataaagcgaagatttggcttgctccgggcggagttggaaagatcctcgccgaggattacaacatcgacatcgaactggatgacgggaaaacagcactttgcatgatgggtgtcggcacagtaattgaagatgttgaccgtctgatcacggcgcttaaggatatttcagagaagggcttatttaaggattccttggaagacagtaaaagagcactgtttccgaaagcaggaaacaaggtgatggaagcctgggagattgatagaatgaaaaaacgcatggtcagcattaagaaagcagcgggaaaagtttcagcatcgtatcttgtaccttatccgccgggcgttccggttgtgtgtccgggcgaaatggtatctgatgctgccgcagactatttatactcgatgaaagaaggctcagttgatggaatgatcgaagacaagatgatctacatccttgatgaagaacaaacatta

SEQ ID NO: 239 - DNA, 2286 bp, Stenotrophomonas maltophilia
atgtacttcaagtccttggattatccggtcatcgttattgataacgactacgaatctccccgtatcggcggtatcttgattcgtgcattggtggaagaattgcgttccaacgaccagcgagtcttgtgcggcttgaacttggatgacgctcgtgcgggtgcacgaacctacgttgcagcctccgctgtgctgatctccattgatggctccgaagaggttgacggcgaatttcagcgcctcaccgcgttcttgagagagcaatctgcccgtcgagctaacctgccagttttcctttacggcgaacgtcgtaccatcgagaaggtgccttccaagttgctgaaatatatccacggcttcatcttcttgttcgaagataccaagtccttcatctcccgtcaggtcatgagagctgcggaggactacatgaagaacttgttgccaccattcttcaaagcactgattcaccatgcagccgaatctaattatagctggcacaccccaggccatgcaggcggcgtggcattcaccaagtcccccgtcggccgtgcatttcaccaattctacggtgaaaacaccctcagatcggatttgtccatctctgtgccagagctgggttccttgctggatcacaccggcccaatcaaggacgcagaaaacgaggctgcgcgtaattttggcgccgaccacaccttctttgtcactaacggcaccccaactgctaacaagatcgtctggcatggcaccgttgcacgtggcgatgtggtcttcgttgacagaaactgccacaagtccttgctccatgcattgattatgaccggcgccgtgccggtctactttaccccatcccgtaatgcacacggcatcattggcccaatctccttggatcagttcaccccagaatccttgcagcaacgtattgcagccaacccactggcgtcgcaagcatacaaggccggctccaaacctcgaatcgcagttgtgaccaactccacctacgatggcttgtgttataatgcagaaaagatcgccgacgagattggttctgccgtggattttctgcacttcgacgaggcttggtacgcgtatgctgcgtttcacccgttctacgaaaaccattatggcatggctaagggtaaaccccgtgagcaggatgcgatcatttttaccactcactccacccataagttgctggcagcattctcccaggcatccatgatccacgtccgtaactccgctcaaagaaacttggatgcggaacgttttaacgaatccttcatgatgcacacctctacctctccacactacggcgtgatcgctgcgtgcgatgtcgcatccaagatgatggaaggtgacgccggccgttccttggtgcaggaaatgcacgatgaggccatcgcttttcgtcgagccatgctgcatgtccgtgatgaccttggccgagatgactggtggttcagcgtttggcagccgacccaagtggaacgttccttggataagggtgacaccccagctcctcttgtggcgaaacgcgaagagtggtacttgcagcctgatgctcactggcatggcttcgagaacttggtggatgactatgtcttgatcgatccaattaaggttacccttctcaccccaggcttggcgatggacggctctatgggcaagttgggcatcccagcagccgtgctgagcaaattcctttggggtcgtggaattaccgtcgaaaagaccaacttgtacagcgtgttgttcttgttctctatgggcatcaccaagggcaaatggtccaccctcgtgactgaattgatggcattcaaagagctgtatgatcgtaacgcaccactttcccaggccttgcctaccctggctgcggactacccaaatgcgtatgcaggctggggtcttcgtgatttgtgtgacgcactgcacgcctttaaccaagagttcgccgtcgctaaggttatgcgtgagatgtacgtcgatctgccgaccccagtgatgaccccagctgacgcatataatcaccttgttaaaggcgaaatcgagcgtgtggacatcgaacagatttccggtcgaattgcagccaccatgttggtgccttacccgcccggcatcccaaccattatgcctggtgaacgattcggcgattctgacgagccgatcattcagtccttgcgcatcgcacgtgaacaaaacgcgcgttttcccggcttcgagagcgatgtccacggtttgatcattgaacaggaaggcgatgcagtgtcctacaaggttgaggtgctgaaagcc

SEQ ID NO: 240 - DNA, 1404 bp, Alicyclobacillus sp.
atggatgaaacaccgattttgagacaactgcttggtgcagcgcaggcggagcgccttagtatgcatgttccgggccatcactcaggcagagatatgcctgctttattggggcaatggttacagtctgccttgcgtattgacttgaccgaactgccgggcctggataatcttcatgacgctactggctcaatccttgcctcgcaaaaactggctgcctcacactatggtagccaggggtgctattactctgtaaacggctccacggcatgtgttatggcagcgatttttgcgagtgtagatgaacgtcatcgggacgttgtggttgctggcccgttccattggtctgtgtggcggggagcccaactggcacgtgcgaaactgtggcggttggcacctgtatgggatgaaaatagactggaaatgctggttccgccgccggaagctattgccaactggcttgctgaccaagcccagtcacatagctgggctgccattgtagttacaagcccgacctatactggacgagtcgcagatattgacgcgtatgcaaggttggcgcatgaatacaattgccctctgatcgtagatgaggcacatggcgcacatctggggctggttacagatctgccgccgcattctgtgcaacagggtgctgacattgtcatccattccgcccacaaaacgcttccggcattaacacaaacggcgtgggttcatcaccagggctcactgctgtcggcagaaagactgaaatcagcgctgtcatttctgcaaacaacgtctccgtcctatcttttattggcttcacttgatgtggctcaagcctggttacgctgtgaagcagcgggcgatgtccttcagttacaacagcatctgtcaatgcttgaccgatggaggaacgtgagcgatgcagaccctcttagaatttggattccgaccggctcaacaaaacgggctcagctcctgaccgaagccttagaaaaggagaacatcttcgcagagtacgtaaacgttgcgggcggacttttaattccgccgtaccatctttctcaaagagatacagttagactggaagcactgctggttagatggcagctggaaagcggcgatcttgatccgaaactgcttgcgattttacaagcagttgcggaatgcacacctcagaagtgtctggatacggctgaccattttccgccgcaagaaacgtgcgtggtttggcagtctggtcactctgctgtgggtcggatttcagctgcctgtgtcatcccgtatccgcctggcatgccaattttattgccgggagatgaaatcagacgcgaacatgtggaactggtcgcgtatctggaagcatcaggagccatccctgtgggctgcaaaccgggatgtcagtttccggtccttagc

SEQ ID NO: 241 - DNA, 1104 bp, Plasmodium vivax
atgcagaccatcgaagcaatgggcaccgtgggcggtatggacccattgggcgctccaggtcctgtgggcaccgctgaaaccccacaggaagaagaagaaatgaaagaagagggtcaaattttgaagtccgacaccgaagagtcggatgacggccaagtggaagtcaaggagatctacaacaagtcaaacttcatcaacggcaagggcgcacgtctggtccgaatcgtttccgaatttgttggcgtgcaggatgccttgcgtgacgagggtattttctttaccgtggtcgttttcggctcctcccgttccttgtccaacgaaaagtatcaatcccgtaagaagaagttggaaaagaagttgtctaagttgaacgatttgatcaccaagtccattccactgactgcaatggaagtggccgaatacgagcgcgtcaaaaaggatctggagaagttgcacaagttgaagtggaccactgactactatgtcaaaatctatgaattgagcaagagattgaccctgttctttggcaccgaagagggtcagaaagctgttaacaatatttcgacccacctgccgaaggtgcattccttccttcccaacaagaagggcgagaagaacccgaacaatttcaccgtggcgatctgcaccggcggcggcccaggcttcatggaagcagccaacaagggctcccgtgaagctaacggccgttccttgggcttcatggtttctttgccgtttgaaaagggtgcgaatcagtacgtggatcaaaacctgtccttcaaatttcactacttctttacccgcaagttctggctcgtctacttgtccttggcattcatcattttgccaggcggcttcggcaccttggacgaactgatggagatcttgaccctgaaacagtgtaaaaagttcaagcgaaacgttcctatcattctgttcggcaaggatttttggtcctccatccttaacttcaagaagttggcagactacggcttgatctcccaagaagatctggactcaatcttccttaccgattgcattgaagaggcctacaattatgtcatcaaccacttgaagtccggctcctgtgttgctgacatggcg

SEQ ID NO: 242 - DNA, 1431 bp, Gracilibacillus halophilus
atgatgaagaaacaacaggtgacgcctttatttgatagattgcaagacttcgcccaacagcattatgatagctttcatgttccgggccacaaaaatggacgcatcgtcgcacataagggtcaagatttctttgaccagctgcttccgttagacgtgacagaattatctggtttggatgatctgcatgcagcgcagggcgttattcaagatgcgcagcgccttgctgccgaatggtttggcgctacatcatcatattttctggtgaatggctcaacagtcgggaatctggcaatgatcctggcgaccgtaactgaaggcgatcaagtttttattcagcgtaactgccataaatcattgattcatggcatcgaactggctaacgcccaaccgatttttctttcccctgattatgacgaagccgttgagcggtacaccgcaccgtcactggaaactatccagttagcctttcaacagtatcctgaggttaaagcactgattctgacatatccagactacttcggaagaacgtacgatattaagtcgatgatcaactatgcgcattcataccaagtcccggtattaatcgatgaagctcatggctgccactttagccttccattcgtaccgtccgatagtgctttagactgtggagccgatattgttgtgcagtccgcccataaaatgacacctgcacttacgatgggcgcgtttttacacatccaatcagaacaaatttcatcaagagatattgaagcatatctgcaaatgcttcaatcatcatcaccttcctacccaatcatggcatcactggatctggcccgccattatttggcaacatacagcaaacaacattggcaccagctgatggcgtttattcatgaaatcacaacgtgtttccaagattctccgcattggaaagttattgcacatggcgagaaagatgaccctttgaaactgacaattgccatcaattcaagattgtcagtttcaacagtagcacatgtttttgaacaagaaggcatcttcccagaaatgattgatgacaaccagttattgtttgtgttcgggctgacgccgcatgttgatgtggacaactttagcagaaaattggaatctatccatcaacagctgaacagctctatcaaacacgcgaagattgaagaaaaacgcatgccgcaactggtcagcaagatcgacaccctgcagctttcttatagggatatgaaaagacgcacaaagcgttggattcggtgggaagaagcaattcatcacatcgcagcggaagctattatcccatatccgcctggcatcccgtttattatcaaaggagaagagattacacgtgatcatgtagactggattcaacatatctttagctatcacgcggaagttcagcctgctcatcgggagaaaggactttatatctatatg

SEQ ID NO: 243 - DNA, 1611 bp, Paenibacillus alvei
atggataaacacaaggaaacgtcacaactcgcgctggctggccaggaacatgttcgtgctcctttagtggaagcactgctgaaatataatcaaaaccagcatgctagctttcacgtgccgggtcataaagatggcaaatggtatgcccatgaatcactgtcactgagcggccgggaagattggaacacactcttgcataagatgtctctcctgcttacaattgacgtaacggaagttgagggcacagatgaccttcatcaccctactgaagccatcgcagaggcgcaacagttagcagcgcaatgctttggcgcagaagagacccattttctggttggcggctcaacagtaggaaacattgcgttattgatgtcctgctgtatccaaccgaatgatgttgtgctggtgcagcgaaacgtccacaaatctgtattgcatggcctcatgatggctggcgcaagagcagtctttctggcaccgcagatggataagggcagcggacttgcgacagctcctaataacgacacggttgaacaagcactgcaggcgtatcctaatgccaaagcactgtttgtgacaaatccaaactattacggtatgggcattaatctgtgtgaacttgcggagatggttcatcgatatgatattccgctcctggtggacgaagcacatggcgcacattacggattacatccagcatttccggaatcagcgttgcaagcgggcgctgatggagtcgtacaatcaacacacaaaatgctgggcggcatgacgatgtccgcaatgcttcatgttcaaggcgcgcgtttgaatagaacacgcctgaagaaactgttaacgatgctgcagtcaagctctcctagctatccacttatggcgtcattagatattagcagatactacttagcacgtaatggtcgggaagcgtttgaagaaggcttgaaagctgtgcaacatgtccgcgctgccctcgtcaacttgacagtatacgaagttattgagatccaaacggctaaaccacagtctgcctactgctcacttgatccgtttaaagtaaccatccgttgtactaatggtcaattatcagggtatgaactgctggaacggttgagcgaatacggttgcacggcagagatggcggatcttcagcatgttgtgctgtcattttcactcggctcatcactggaagacgctcaaagacttattaccgccttacaggccgtagcagttacattagatgacaacaccccatacactaagatccaagttgctacatacacggaaaacattgatacaccgggcagatcaatcacttttgccgacgggcaacgcatgtatagcgaaccggtttcattttcaatctatgaacaggagtcagttagaacaaaaagagtttcagtccacgaagcagtgggacataaggcagcggaatctgtcgtaccgtatccgcctggcattccgctgctttaccctggagaaattatcacagaggctgccgcacaggaactgatcatgctggcgcacgctggcgccaaatgtcatgatgcggaagacgaatcactgttgacagttcgggttgtggtcacggaagatgagaagggaattgaagac

SEQ ID NO: 244 - DNA, 1449 bp, Bacillus subtilis
atggtcaacctgaatcagcaagatttgcctctggttaacgcgcttaaggcattggcgcagcaaccagacacccctttctacgcaccgggccacaagcgtggtcaaggcatctccccttctttcaaacagtggttgggtccgaacctgtttcaagccgatttgccggaactgcccgagcttgacaacttgttcgctccaaccggcgcaatcgccaaggctcaggagcttgcagccgatttgtggggtgccgaacacacctggttttccgttaacggctccaccgctggaatcgtggctgcgattctggcaacctgcggcgatggtgacaaaatcttgctgccccgtaacgtgcaccaggcagccattgctggtatcattcatgcgggagcagttccaatcttcttggaacctgaggtgaacccggattgggaccttgcgttgggcgtgaccgaagaaaccctgtccaaggcacttcaggaacacgatgacgccaaagctgtctttcttctcaacccaacctaccacggcgtggtcggcgatttgcagaagctgattaaactttctcaccgcgtcaacttgccagtgatcgttgacgaggcacacggcgcacacttcgcgtttcacccatccttgccacgtccagcattggaactgggcgccgacatcgttattcagtccacccacaagatgctcggtgctttgtctcaatgcgcgatgatccacggccagggcaacttgatcaacccaccacgtatctcccagtgtcttcaactcatccagtctacctctccaaactacgtgttgctggcatccttggatgatgcaagacatcagatggctaacggcggccgtgaaaagatggccgagcttctcaatttcaccttgcactatcgccagcaactgtcccaaatccccggcttgaccttgctggagattactaaaccgctgcccggtgccttgatcttggacccaacccgaattactgtggacgtcaccgcttggggcatgtccggtttcgaagttgatgatttgttgcgtgagaagtttcagatcaccgcggaactgcctactcttcgacaattgtccttcatcgtgagcattggaaaccaggcacaagatttgggccacttgttggaagcattgacccagctggcaccaactaacccacagcaaccgtttcaccttaccctccccgtgttgccaggcaccatcctggcaatgaccccacgtcgtgcagctcacgcagcacagaagtccgtgaccgtgaacgaggccatcggcaagatctccgctggtcttctctgtccttacccgcccggtatccccgtcttggtgccaggcgaaatcattaccccggaggcgattgcattcctgaccgaagtgttgaacttgggcggcaccatctccggcttggcatccgaagaattgacccacttggctgttgtgaat

SEQ ID NO: 245 - DNA, 1440 bp, Bacillus licheniformis
atgaagaccccgctgtatactgcacttgttaaccacgccgagggccaccattactccttccatgttcccggtcaccataatggcgatgtgttctttgacgaggcaaagaccttctttgaaaccattctgaaagtggacttgaccgaactgactggcttggatgatttgcacgagccatctggcgtcatcaaggaagcacaggatttggtgtcccgtttgtacggtgccgaagaatccttcttcttggtgaacggctccaccgtcggtaacttggctatgattcttgcggtgtgccagccaggcgacaccatcttggtgcaacgtaactgtcacaagtccgtgttccatgctattgaattgtccggtgcgcacccagtcttcttgacccctgagatcgacgaagctatggcggttccaacccacatcctgtacgaaaccgtggaagatgctatttctcagtatccacacgcgaagggtatcgtgttgacctaccctaactactatggacatgctgtcgatctgaagcctatcattgagaaagcgcaccaacatgacatctccgtgttggtggatgaagcacacggcgcacacttcgtcctgggacacccatttccccagtcctctcttaaggcaggagctgatgctgtggtccaatccgcacacaaaaccctgccagccatgactatgggctcctacttgcacttgaactccggccgtatcaaccgtgatcgattggcatactatttgtccgtgctgcagtcctcctccccgtcctatcccatcatggcatccttggacatcgcgcgcgcatacgccgaagacatccttaagaccaacagaactgctgacatcgagaaagaactgattaacatgcgtgaggtcttctcccagatcaacggcgcggatattgttgaaccggctgacgcgcgtatccgtcaagatcccttgaagctgtgcatcagatctgcatacggccacagcggcttcgaattgaagtccatctttgaagctaacggcattcacccggagttggcggacgaacgtcaggtgttgctgatccttccattggaaggcaagaacatgccagcacctgaactgatctccaccatttctaaggatatgaaagacaccgcagtccgtaatgatttgccggccggcatcggtattccctctgagaaagttaccgcactgccatatcgtaagtccaaactttcagcattcaagaaggaatccgtgccattcaccgaagcagccggccgtatctccgctgaatccgtgaccccatacccacctggtatccctttgattatggcgggagagcgtatcaccaaggaaaccatctcccgtttgacccgtttggtggatttgaacgttcacattcagggttccaatcaactcaagcagaaacaattgaccgtgtacatcgaagaggaaaaatcc

SEQ ID NO: 246 - DNA, 1440 bp, Anoxybacillus flavithermus
atggatcaacagcgtacaccgctgtatactgcgctcaaacggcatgactcgattcacccgttttcattccatgtaccgggtcacaaatatgggatcgtttttccgaaagaagctaaggatgactacaaacaactgcttaaactggatgccacagaactgagcggcttagatgacttgcatcaccctgaatcagttattgcggaggctcagtccctggcagcgaaactttacaacgttgaagctacatttttcctggtaaatggctcaacagttggaaacttagccatgatctttgcagtttgcggagagaaaaagaaagttattgtccaaagaaactgtcataagagcatcatgcatgctctgcagttagtgggtgcaaccccagtctttctgccgcctgaatttgatgaggacgttagagttgcgagctatgttgcttacgaaacaattaagaaagcaatcgaactgcatcaagatgctgccgcattagtgttgacaaatccaaactattacggaatggcagttgatctgacggaagttgtgaatattgcgcatagataccgcatccctgtgttggtcgatgaagcacatggcgcacattttgtccttggcgatccgttcccaaaaaccgccattacttgcggcgcagatgtcgtagttcagtcagcacataaaacacttccggcgatgacgatgggaagctatcttcatgttaattcatcactgatcgataaggaaaaactgaagtattttctgcaagtcttccaatcatcatcaccgagctaccctatcatggcatcactggatctggctcgctcctatctggcccgtctgacgcggaaggatattgaagacatctttaaacaaatccaacagctcaaggatgctttagacgaaattgagggcatcgccgtggtccattctcagcaccctttcgttaagacagatctgttgaagatcacaatccaaacgcgttcccagcttagtggttacgaattgcaacagcggctggaacaagaaggcatttttgcggaactggcagatccgtttaatgtactcctggtttatcctttggcagtagttgaaagactggaagaagttattaagaaagtcaaacgcgcgtttcatggattatcctacagtgaagaactgttacacagctttagagcattttcattttcagcatcatcagcggctattagctacaaggaacttcaaacactcccgaagaaagttattgatctggaaaaagctgagggttttattgccgcagaaacaatcacgccttatccgccgggcgttccgctgctgtttattggagaaagaatttcaagagaacatattgagcagatcaaaagactgaaatcataccatgcccgctttcaaggcggaaaattcctgtcatcagatcagattgaagtgtatagcacgtcaaagaaa

SEQ ID NO: 247 - DNA, 1335 bp, Staphylococcus aureus
atgaagcagccgatccttaacaagttggaatccttgaaccaggaagaagcaatctccttgcacgtgccaggccataagaacatgaccattggccacctgtctcagcttagcatgactatggataaaactgaaatcccaggcttggatgacttgcaccatcctgaagaggtcattctggagtcgatgaagcaggttgaaaaacactccgattacgacgcctatttcctggtgaacggcaccacctctggcatcttgtccgtgatccagtccttctcccagaagaagggcgacatcttgatggcccgcaacgtgcacaagtctgtcctgcatgctcttgacatcagccagcaagagggtcacttcattgaaacccatcagtccccgctgactaaccactacaacaaggttaacttgtcccgtttgaacaatgatggccataaactggcagtgcttacctaccccaattactatggtgaaaccttcaacgttgaagaagtgatcaagtccttgcaccagttgaatatcccagtgttgattgacgaagcacacggcgcacacttcggcttgcaaggttttcctgatagcaccttgaactaccaggcggactatgtggtccaatccttccacaagaccctgccggcacttactatgggctccgtgttgtacatccacaaaaacgccccctatcgtgaaaccatcattgagtacctgtcatatttccagacctcttctccatcctacctgatcatggcatccttggaatcggcagcccaattttacaagacctatgattctactgtcttctttgacaaccgagcgcagctcatcgaatgcttggagaagaaaggcttcgagatgctgcaagttgatgaccctcttaagttgctgattaaatacgaaggcttcaccggccacgacatccagaattggtttatgaacgctcatatctacttggaattggcggatgactatcaagttctggcaatcttgccactgtggcaccatgatgacacctacttgttcgattcccttctccgtaagatcgaagacatgattctgccaaagaagtccgtgtccaaggttaaacagacccaattgctgaccactgagggaaactacaagcctaaacgtttcgaatatgtgacctggtgtgatctgaagaaagcaaagggtaaagttcttgcccgacacatcgtgccgtacccacctggtattcccatcatttttaagggagaaaccatcactgagaacatgatcgaattggttaacgaatacttggaaaccggcatgatcgtggaaggtattaagaacaacaagatcctggtcgaagacgag

SEQ ID NO: 248 - DNA, 1491 bp, Clostridium sp.
atgaatcttaaacgtcaagaacatacaccgctgctggatgctatcaaaaaatatgttgaatctgagccggttccgtttgatgtaccgggtcacaaaatgggctcactgaagacggaactgagcgattatgctggcgaaatgttataccggttggacatcaatgcccctattggcctggataatctgtatcatccaaacggagtgatcaaagaagcggaggacctttttgctgaagcatttggtgctgatgaagccatttttagcgtcaacggcacaacgggcggaatcatgacgatgattgtaggaatcatcgacgcaaaggataagatcatcttaccgcgtaatgttcataaatctgtgatcaacgcgctcattctgtcaggcggcattccgatctttgtcgctcctgatgtagaccaggatacaggcattgccaatggagttcctacggagaactatgtgaaagcaatggacgaaaatccggatacaaaagcgatctttgtcattaaccctacatacttcggtatcacgtcagatctgaaagcaatttgcgaagaagcacataaaagaggcattatcgttattgtggacgaagcacatggcgcacatctgcattttaatgattcaatgccgctgagcgctatggaagcaggagcggatatttcatcactgtcagttcataaaacaggcggctcactgactcaatcttccgtcatcttggttaagaaagatcgtgtcaactttagccgtattcagcgggtatttgccatgttttcatcaacatcacctagccatctgctgctcgcatcactggatgtcgcccgcaaaaaactggtattcgaaggcaaagaactgctggataaggaactggaactggctaagtacgccagagaaaagatcaacaacattcgcggctattcttgcatcgacaaatcctactgtgatagaccgggcagatttgacttcgatcttaccaaagttgtgattaatgtttcagaagttggcttatcgggatttgatgtctataaaactatccgaaaggaaagcaacattcaactggaactgggcgaagtttcagaagttctggcaattatcagccttggcacaactaaagaacatgttgacaaactgatcgcagcgctcaaacgcatttctgatgaatattacgactccaccgatgttcataaagtgcctcactttaagtatgagtacccagaactggttgttagaccgagagaagcatttcatgcgccatctaaaatcgttgctttggaagatgccgtgggcgaaatttcagcggaatcactgatggtgtatccgcctggtattcctatcgcaattccgggcgaaattatcacaaaagacgcgctggatcttgttgaattttacgaaaaatcaggcggcgttttattgtctgactccccggatggatacatcaaagtcattgaccaggagaagtggtatctgcgcagcgaaattaattacgatttc

SEQ ID NO: 249 - DNA, 1491 bp, Firmicutes bacterium CAG:345
atgaacaaggaaaaacagaacaataccccattcttttctgagatgaagaaatacatcgaatccgatccaacctgcttcgacgtgccaggccacaagatgggcaactttgataatgacctggaagagtacgccggcaagaccttgtataaactggatgtcaacgctccgattggtcttgacaacttgtaccacccacacggcgtgatcaaggaagcagaggatttgctggcggacctttataacgtcgatgaagcattgttctccatcaacggcaccaccggcggcatcatgaccatgatcattggcaccatcgacgctaaggaaaagatcattttgccgcgtaacgtgcacaagagcatcatcaactcacttattctctcgggcgcctaccccatcttcgttatgccggataccgaccccgaaaccggtatcgcgaacggagtgaagatcgataactacatcaaggcaatggatgaaaacccagacgctaaggcggttttcgtgattaaccctacctattttggtgtcacctctaatatcaagaaactggcaaaagaagcccacgagcgaaacatgatcgttattgctgacgaggcacacggctcccacttgtacttccatgaagatttgccgctgggagcaatggcagctggtgcagacatctcctccgtgtccttgcacaagacctttggctccctgactcagtcctccgcgatccttattaacaaagaacgtatcaacgtgtcccgtatcaagaaggtgtacgcaatgttgtcttccacctctcctaaccacattcttctcgcttccatcgatgttgcgcgtaagcgaatggcattggacggtcataaattgctgtccaacaccttggatttggctcgtaagacccgcgagcgtatcaacaagattcgaggcttccactgtttggataagtcttacctggacggtaacggccgtttcgatattgacgaaaccaaactggttatcaacacctctgaagtgggcttgtcaggtttcgaaatcttcaagttgatgcgtgaagtggagaacgttcaaatggaattgggagagatctccgaacttctcgccatcttcaccattggcaccactcagaaggatgctgaccgtttggttgaaggcctgcaaaagatctccgataagtactacgacatcaccgacattaagactatcccacacttctcttacagctttccagagctgatcgtgcgtccacgtgaagcattccatgccccttccaaggtcatttctttggatgacgccgttggcgagatctccgctgaatctatcatgatctacccaccaggcatcccactggcgatccctggcgagatcattacccagaacgcaatcgatttgctgcacttctacgaaaaggaaggcggcgtggtcctgtcagattcgccagacggttatatcaaggtcttggatcaagacaaatggtacttgggctccgaattggattatgacttt

SEQ ID NO: 250 - DNA, 1584 bp, Brevibacterium linens
atgggccacatgttggcagatacccacttgcacccagactctgctaccagaactgctaccaccccagctcctacccaggcaaacacctctatcgatccacgtcaacacaccgccccctacgcggaagcattgcgttccttggcagccgatgactggcagcgattgcacgtgccggcccatcagggctcccgtgatcacgcccccggcctggctgaagtggtcggagaggctggcatgtcaatcgacttcccaatgttgttctccggcgtggatcaggacaactggcgcatgatcaatcacgatagagttacccctattatggctgcgcagcaactggcagccgaagcatggggcgcatcccgtacctggttcatcactaacggtgcatccggcggcaatcacattgccaccactgttgtgcgtggtttgggacgagaatttgtgctgcaacgttccgcacactcctctgttatcgatggagtgacccatgctgagctgcgcccacacttcgtgcacggcagagttgatcctggccttggctcctcccacggcgtcaccccagcagaagttgacttcgcccttcgtgagcatccaaactttgctgcggtttacttggtgtccccttcgtatttcggcgccgttgctgacatcgcagccattgccgaagtggctcaccgccatgatgtgccacttatcgtggatgaggcatggggttcccacttcggaatgcatccaaagctgcctgtcaacgctgttcgtcttggtgcggatttggtcatctcctccacccacaaaggagctggctccttggcgcagtccgcaatggtgcacctgggccacggcccacaagctaagcgtatcgaaaccttggtcgatcgagtcgttaaatcctaccagtctacctcttcctccgctattttgttgtcctccttggatgaggcgcgtcgtcacttggttacccatccagaagcgatcgaaaccgcattggatactgccgaagagattcgcacccgtgtgaagaacgacactcgtttccgagatgctaccccagacatcttgggcggccacgatgcgattgataatgacccttttaaagtggtcatcgacacccgtggcgcaggtattaccggctccgaagcgcagtaccaattgatccgcgatcacagaatctactgcgagctggctaccccgtctgcattgttgttgctgatcggtgcaacctctcccgtggatgtggatcgtttctggaccgcattgcaggaactgccaagatccgaagctgagccagtgcgtccaatcgtgcttcccggctcctgtcagaagcgtttggacatctctgacgcctacttcgctgaaagccaaaccgtgccatttgcggaggcagtcggtcgagccagcgctgattcattggctgcgtatccacctggtgtgccaaacgtcttgccaggcgaagtgctctccgcagaggttgtggactttctgcgtgctaccgcagccgctccatccggatatgtccgtggtgcacaggattctcgaatggacactttcgcggtcgttgcagaaccatcctccaccgatctgaat

SEQ ID NO: 251 - DNA, 1782 bp, Chlamydomonas reinhardtii
atgcaagaaccggatcgactgcctggaattgagtctgctcatagaggcggcggcacaccgccgcattttgccagcttaatgacagcaggcggctcaggaaacggagatggcggcctgacaccggctttctccccgttgcaatatgatctcacagaaattgctggattagactacttgtcaagcccgtcaggcgtgatcgccgaggcacaacagttagcagcgcaggcgtttggcgctgatcgaacatggttcctggtcaacgggtgctcagcaggcatccatgctgccgtcatggctgtagcaggaccgggcgctggccgggcaagacgccgtcggcaacaggtgcaacatccgcaagatatggacaatacatctggctcagcggatggtcaaacaacaacatcagatgcaggcggccagggagctgaaccagcttctgagaaaccgggcgttctgcttgtggccagaaactgccatctgtcagtctttagcgcattagtattgagcggacttgaaccggtttggctggcgcctgaactagatccgagagctggcgtggcacattgtgtaacaccgggcacagttgcagcggctctggctggtgccgcagcggctggcagaagagtcgctggagtaatggttgtgtctccgacatattttggagccgttgcagatgtgcggggtattgcccaggtctgcgcaggctacgatgttccgttattggtggacgaagcacatggcggccactttgcatttctgccgccggcatcactgccgccgccgccgccgtcagccctttcctgtggcgcagatatggtcatgcaatctacgcataaggtattaggagcaatgacccaggccgcaatgctccatctgagaggcgaacgggtttcagcggctcgaacatcaagagcactgcaaacactgcaatcatcatcaccgagttatctgctgatggcttcacttgatgctgcaagacaacaggcagcagcaggcggcgcatttgctgaaccgtgcgcagcggctcaagttatcagagaggcagtttcaagatgttcgttagtccagcttttagacaatcaaacagcgcagggtgcttcaaattcaggctcatcaacagaagttggcggctcatcacatgcgggcacatcatcatcaacactgcatggccatccgggctcatcatgcaatgcggaaagcattgcatttttcgatcctcttcgtttaacactgctggttgatagaattgctgcagttccggcggctgccgcagacggatcttccaactctgttagacgctgttccggctcatcaggttttgccgtgagcgaatggctggaagcacgtcatggcgtcgtaccggaattggccactgcaaaaacagttgtgttagcactgggaccgggctcaacactggctcacgctagacaagcagttgcggctattctggaacttgatagattagccgcagcggctccgcaagactgggcaggcggcggcgttcaggctgaaccgcctcatgcaccgctggcaccagatatggtgttgtcacctcgtgacgcgtattttgctgaaacagaatcagttccggctgcagaagcagtgggacgggcctctgcagaactgctttgtccgtatccgccgggcgttccggttctgtttccgggcgaacgcatcacgcctgcggctcttgctgcattacaggcaaccttagctgcaggcggcacagtcacaggagcatctgattcaagcctgatgcgttttgaagtacttgtcgtagac

SEQ ID NO: 252 - DNA, 1407 bp, Carboxydocella sporoproducens
atggcccaactgagagcgtatggcaaaattaaaatcatgaacaaacaggcagattgcccgatttttgacgcgatcaacgaataccttgctcaaaagggcgattgttggcacatgccgggacatggccaaggtcgtgccttccagtcactgtggcctgaacttgcagcggttgcacggtgggatgtgacagaaattcctggattagacagctggcatcagccagaaggttgcatcgctgccgcagaaaaactgcttgcggaagcatatcaaacgcaagcatcatttttcctggttgaaggggcctcggcaggcatttgggctatgatggcggctgttgtgtctcaaaatgggaaccgaattgccatcccgagatgggcgcatgcttccgtctttcacgccctggtacttacgggcgcagaacctgtgttttatccgccggtttttctgccggaatggcagctgattatcggacctgaaaccgagggtgttgctctggattcagacgggattttctttctgtatccaagctacgaaggcgtggcctggccgcttaaggattggatgctcgcaaattcatacaacacaacggctccggttttagtggacgaagcacatggcgcactgtttccgtggcacgagagaatgccggtctctgcaatcacttccgggtgtgatggcgtcgttcatggcttacacaaaacaggcccggcgttgacgcaaaccggctatctgcatttgcctacggcgaaactgaaggctgattgggttcgcaaaaatctgtcactgttgaccactacatcaccgagctatctttttatggccgcactggatctggctagacgcgaattatactttcatggccgtgagaaaattgagcaaatgctggaatgggccgagcagttaagatgggaactggaacgcattggaatcgaagtgttgaaacctgagcaactcccagcgggttatcagttagatcgtacacggctcctgcttagattggaaggatacactggtgtcgaggtagcaacacatcttagacaaaaaggaatcgttgtggaaaagtatgaggcggatcgcgtcttattgctgattaattacgactttaacccggaacaaggtaaacggctgatcgaagcactgggacagttaaaaccgaagacaggtaaacctaattgctggaaggaacagttttatcctgaagagaaccgtttggtcatgctcccgagagaagcatggcttgcaaagaaagagcgagtagccacgaaccaagcaaaagatagggttgctgctcagacagtagcaccatgcccgccgggccttgcaattgtttgtcctggcgaagtgattcaggcggacacaatcgccgcactggaagcatggggcattgaagagatctgggtcgtaaaa

SEQ ID NO: 253 - DNA, 1443 bp, Geobacillus sp.
atgatggatcaatcccgtaccccattgtatgacgccctgatgcaccattggacccagcgtccagtgtccttccacgtgccaggccataagtacggcaccgtgttctccaagaaggcaaaaactatgtttcttcctttgctggcattggatgctaccgaaatcgcgggccttgatgatttgcaccatccggaatccgtgatcgcagaggcccaggctcttgcagccgaattgtacggcgcacgtgaaaccttcttcttggttaacggctccaccgcgggaaacttggcaatgatcgctgcggtgtgccgagagaagggccaaaaagttatcgtgcagcgcaactgtcacaagtccattatgcatgcacttcagctcatgggtgccaccccagtgcttctctctccagaagtcgatactcacgtccgtgttgctagccatgtgcgtaccgatcgaatcaaagaggcgttggcactgcactctgacgccgtcgctattgttttgaccaaccccaattactatggcatggctgttgatttgaccgaaatcgtgagactggcgcacgagcgtggtattccggtgttggtggatgaagcacacggcgcacacttcgtggctggatgcccatttcctaagccagcgctggcatgtggcgctgacatcgtggtccaatcagcgcacaaaacccttcctgcgatgactatgggcgcattcctgcacgttaactccgaacaggtggacatcgagcgcctgaagtacttccttcagttgttccagtcctcctccccttcgtatccgattatggcctccttggacctggctcgtaattacgtggcggaattgaccaaggatgacgtcgcagccatcgtggcagaggtcgaagaattgaaagccgtcatcgatgacattgatggagttgcagtggtgtcctcccagcaatccggcgtccaaaccgacttgctgaaggttaccgtgcagactcgttgccgattgaccggttatgaattgcagcaacagctggagcgtcagggcgtgttcgccgaactggctgatccctttaacgttcttctcgtgtgtccacttgctgcgaccggccgtttgagagaagcagccgagcgcatgaagagagcatggcgtcagttgcctaccggtgaagaaccaactttcggctccttcatgttgagcgactccccattgtcctccgtggtgtcctacgaaaaattgcgacacgcccgtaagaaggcagtgtccttggaagaagcagaaggccgtgtcgctgcggaaaccgtgatcccttacccacctggtgtcccgctggtttggattggcgaacgagtcggttccatccacattgcacgtatccgagagttgttgagacaccgtgcacactggcaaggcggttctcagcttcgtgagggcaagttggtggtgtacgaatgggagggt

SEQ ID NO: 254 - DNA, 1461 bp, Eubacterium sp.
atgaagaaagatttgctggaacgtcttgaagagtactgcggagctgactatgtcccactccacatgcctggcgcgaagcgaaacacccaggagttcgttatgccgaatccctacgcaatcgatattaccgaaatcgatggctttgacaacatgcaccatgccgaggacattttgaaggaagcattcgagcgtaccgccaaactgtttggcgctgaagaatccttgtggctgatcaacggttcctctgcgggcttgctcgcagccatttgcggtgcaaccaagaagaacgatactgtgttggtcgcacgtaactgtcaccgagctgtctacaatgcgatctatttgaacgaactgaatccggtgtacctgtatcccaaggaagtgacctctggaatctacggcgcagtgtccccatcacaggtggaacaggcattcaagcagcacgagaacatccgagcagtgatcattacctctcctacctacgaaggcattgtctctgatgttaagaaaatcgcagagattgtccaccgttatggcaagatcttgattgttgacgaagcacacggcgcacacttcgcctttcatgaagcgttcccggagtccgcagtgttctgcggagccgatgctgtgatccagtcaattcacaagacccttccatccttgacccagactgccttgctgcacttgcagggtaacatcgataaagaacgcgttcgtcgatactgggacatgtatcaaaccacctctccgtcctacgtgctgatgggcggtatcgacagatgtatgaccgtgttggaaaccaagggcaaaccattgttcaacgcgtacgtgacccgccttctcgcattgcgtaagaagttggaaatcctgaccaatattcgcctgtttccaactgatgacatctctaagattgtgttgttggtgcgtgatggcaagaagttgtaccaggaacttctcaacaaatatcacatccagttggagatggcatccttgcaatacgtgatcgctatgacctctattggcgatactgacgaatactatgagcgtttctttgaagcattgcgtcagatcgatgacgagatgcaaaccaagattcgtcgtggtcagaaatcccagctgcaaaccgaacagaacatcaagcaacgtaatgagcttccaaccgaattggaaaacgttgaaaagatcactgcgttcatggaatgctttccagaggtgaaatgtaacccttacgatgcccaaaatggcgacgctgaacctgtcgagcttggcttgtgcgttggtcgtaccgctgcggcaggtgtgtgtttctacccaccaggcatcccactgattcaggcaggcgaagtgtataccggcgaaatcgccgagatcattcgtgaaggcatccagaagaacttggaagtgatcggcattgaaaagtccgagaaaggtgtttacgtgtcttgcttgaagtcctatttc

SEQ ID NO: 255 - DNA, 1422 bp, Sediminibacillus halophilus
atgaatcaggatctgacaccgctgtttggcgcattacagacattctcccagaaaaatccgatttcatttcatgttcctggtcacaaaaatgggaagatttttacggataacggactggaaattttcgagaaactgcttcaaatcgacgttaccgaattaactggtttggatgatctgcatgtggctacaggggccatcaaacaggcgcaaaatttggcagcgagctggtttggcgctgatgaaacatttttcctggtcggcggatcaacaacgggtaacctcgcgatgatgctgaccgctgccagactggggcgcaaagttcttgtgcagcgcaattgccataagtccattcttaacggcctggaactgagtggagctgagcctgtctttgtagctccagcctatgatagacgcgtaggcagatatacagcaccgacgcttgataccattcgccaggcgatcgaccaatatccggaaattggtgctatcgtcttaacgtatcctgattactttggcacagtattcgatctgccgtcagttgtggaactggcccatcagagaaatattgcagttttggtggatgaagcgcatggtgtccacttttcgctgtcagaagtattccctgcatcggcactggaactgggagctgacctggtcgtacaatccgcccataaaatggctccggcccttacaatggcgtcgtatttacatatcaagtcacacatcatcgatcgtggcgacgtggctcactatctgcagatgcttcaatcaagctctccaagctacccgcttatggcatctttggatctcgcgcggtactacctcgctggaatcaaggaaaacgaactgaaccctattttagaatcaatcgcccgtttaagagaagtttttagctcagcagaaggctgggaagttctgcctaatgaagccggaaaagatgatccgctgaagattacactggaagttgataaaagatggagcggcatccaggtagcaaaactgtttgaagaacaagacatttatcctgaactgtcaacagagaaccaggttttatttattcatggattggccccgttccaggaatgggagagacttcaaactgcagtggaaaaaacaagccaacgtttaaagtttttgccgaatcgggatacaattggctctgtccagatcgaacaacagcaaatccattcactggaagtttcataccaaacgatgaaccgaatgaggaaagaatttattggttgggcatctgctgagggtaaaattgcagctcaggctgttattccatacccgcctggcatcccggtgttattgaaaggagaaaagatcacgtctgtccatatcaagatgatcaactacctgatcaagcagggcatcaacttccaaaaccacaacatcgaacaaggaatgtactgtcttcgt

SEQ ID NO: 256 - DNA, 1419 bp, Lysinibacillus odysseyi
atgaaaagcgaaagaccgctggttgaagcactgcaaaaatttgtggaaaaggagccgtattccctgcatgtccctggtcacaaaaatggcagactgtcaacattgccgaaggaaattaagaaagcactgatctacgatgtaacggaactgtcaggcctggatgacttccatcaccctgaagaagcaattgatacagcgcaaaaactgcttgctgaaacgtatggagccgacagatcatttttcctggtcaatggctcaacagtaggaaaccttgctatggtctacgccgtatgccaacagggcgatacaattctggttcagagaaacgcacataaaagcgtgtttcacgcaatcgaactggttggagcgaaacctgtgtatcttgctccagaatgggatgaccatacccgttctgcaggcgttgttccgctggaaacaattaaagaagcactgagagaatatcctgaggctaaagcactgtttctgacatacccaacgtattacggagtcgtagccaaagatttacgcgaacaaattgaactgtgtcatgcacaacagatcccggttttagtggacgaagcacatggcgcacattttacagcgtccaaagaatttccgatttcagcactggaactgggggcggatattgttgtgcattctgctcacaaaaccctgccggcaatgacaatggcatcatttatgcatatcaagtcgaagttcgtctcagaccaaaaggtaaaccactatctgagaatgctccagtcaagctctccttcgtacttattgctcgcttcacttgatgacgcccgccattatatcagcaaatacaaggaatctgatgccgtgtattgcttagaaagacgcaaacagtggattgaagcactggaaagcatcccggaactggaactgattgaagctgatgaccctcttaaagtctgtattagaatgaccggctatactggaatcgaattaaaagaagcaatggaagagaatctgatttacccggaacttgctgatattgaccaagttctgcttgtgttaccattattgaaacatggcgatttgtatccgtacgcggaaattcgtatccggatgaaacaagtcgtaacgcagttaaagatgaagaaaggctcagggcaaccacagatgggaaaacagtataagatggcctcaattatcacaccgaacgctacgtttgccgaaattgaggcaaaagaaaaggagtggattccgtatatgcgatctatgggcaggatcgcgggcggaatgttaattccatatccgccgggcattccgctgtttgttccgggcgaaaaaattacagtatccaaactgagtcagctggaagaactgctggctatcggtgcagcgttccaaggggaacatagactggaagaaagattgattcaggttctcaaa

SEQ ID NO: 257 - DNA, 1449 bp, Bacillus subtilis
atggttaatcttaaccaacaggatcttcctttagtgaatgccctgaaagctcttgcccaacagccagacacaccgttttatgcaccgggccataaacgaggccagggaatctcaccgagctttaagcaatggctgggacctaatctttttcaggcggatttacctgaattgccagaactggacaacctgtttgctccgacaggcgcaattgcgaaagctcaagaactggcagcggatttgtggggagcggaacatacatggttcagtgttaacggctcaacagccgggattgtggctgccatcttagcaacgtgcggtgatggggacaaaattctgcttcctcgcaatgtccatcaggcagcgatcgctggcattatccacgccggagcagtcccgatttttctggaaccggaagttaacccggattgggacttggccctgggcgttacagaagaaacactgtcaaaagcacttcaagaacatgatgacgcgaaggctgtatttttattgaatccgacatatcatggcgttgtgggcgatctgcaaaaactgatcaaactgagccatagagtcaatctgccggttattgtggatgaagcacatggcgcacattttgccttccatccgtctttaccgcgtccggcactggaacttggtgcggatattgtaatccaatcaacacataagatgctcggcgcactgtcgcagtgcgccatgattcatggccaaggaaatctgattaacccgcctagaatctctcaatgtttacagttgattcaatctacgtccccgaattatgttctcctggcatcccttgatgacgcgcgtcaccaaatggctaatggcggacgggaaaaaatggcggaactgttaaactttacattacattaccgtcaacagctgagccagattcctggccttacactgctggaaatcacgaagccgctgccgggcgcactgattcttgatccgacccggatcactgttgatgtaacggcttggggcatgagtggatttgaagttgatgacctgcttcgagagaaattccaaattaccgccgaacttccgactttaaggcagttgtcatttattgtgagcatcggcaatcaagcacaggatctgggacatctgctggaagcactgacacaacttgcaccgacgaaccctcaacagccattccatcttacgttaccggttctgccgggcacaattttggcaatgacaccgcgcagagcagcccatgcagcgcagaaatcagttaccgtgaatgaagcgattggtaaaatttcagctggcctgctgtgtccttatccgccgggcattccggttctggttccgggcgaaattatcacaccggaggccatcgcatttttaacagaagttttgaatctgggcggcacaatttcaggactggcgtccgaagaactgacacatttggctgtcgtaaac

SEQ ID NO: 258 - DNA, 1401 bp, Gloeobacter violaceus
atggaaacaacaccgctgtgggatgcgctgagagcggtcgctttagcctctggcacaggatttcatacaccgggccacaatggcggagcgggtcttccgcctgctttaaaacattggccggattggggcagactggatctgaccgaattagcgggattggacaatctgcatgctccgacgggtgttattgcacacgcgcaacgattggcagcggctgtatggggcgcggaacgttcctggtttcttgttaatggagctacagccggtattcaagctatgctgcttgccgcacttggtcaagggcagaaagtcttagtaccgagaaactgccatcagagtatcgtacacgcgttggttctctcgggcgctgttccggtgttcgtccaacctgtgtgggatagacgctggcagttggcacatggcctcacggcaaccactgtagaagcggctctggccgttcatcctgacatccgtgcggttgtggctgtgcacccaacctattttggtgctgtcggggagacaagagcaattgcgcgggtggctcatgccaaaggcatcgccttattggtcgatgccgcacatggcgcacatctgcggttccatccggatcttcctgaatgtgcgttagcggctggcgctgacttagtcgtacatagtgcccacaagacactgccggcacttacgcaagccgcactgctgcatcaacagggaacacttgttgatccggcaagagttgaaatggcactcaatcttctccagacaacgtcaccgagctacttgctcatggcgagcctggaccttgcaagagcacacatggttagacatggcagggaacagctgggccatattctggaaatggcgcatcgtttacggcacaaattgccgtttgcagtgctgggcggcgatggcacaccgggctttgacccaactagactggttattgatgtcggtgaaaaggggtggtctggccatgcggctgaaacatggctggaacaaaatgcacaggtgcgtgccgagatggcaacacatcggcatctggtctttattctgaactcagcccatacggaatttgatggcgagcaattgcaggcaagcctgcttgctctggccacagcacaacctacaggagctacaccgccggacttactgccgccgccgctgccagaattgcgatattcaccgagagaagcatttggtagatctcatagatccgtaccgttagccgcagcggctggactgacatctgcagcagatgtctgcacgtatccgccgggcgttccggttctcctgccgggcgaagttgtggcggctcagtcagtcgagtaccttggagccgcaattgataccggagcagaaactgtaggtatcgacggcagaggacatattcgcgttacaatcgat

SEQ ID NO: 259 - DNA, 2319 bp, Methanolacinia petrolearia
atgaaccctgaagaacgtttgcaggttggtgtgatcgatgcgaatgtccacaccgacaccccagctggccgtgcagttaccaagatcattcaagatcttgcagagtacggcattgaagtcaccgttttggtgtccaccgaagatgcgcgtgcagcccttagcaacttgccatcagcagactgcatcatggtgaactggaatgtcggcgagtctgatgacagcccagctggcaagaaggtggcatccggcgtggatgccaacctgatcatttcagaaatccgcaagagaaatgaagagatcccaattttcttgatgggcgagcctacctctgaaccacctaagaaactgccaatcgagatgattaaaggcatcaacgagttcgtctgggttatggatgacaccgcggaatttttggcaggtcgtatccgagctgcggcaaagcgttaccgtgatcagttgctgccgcccttctttggcgagctggtgaacttctcccgtgactttgaatattcttggcacaccccaggccatgcaggcggcaccgcattccgtaagtccccagcgggccgtgcattcttcaacttctttggcgagcaactttttcgttctgacatctccatctccgtgggagaattgggctccttgttggatcactccggcccagtcggagaggccgaacgttacgccgctaaagttttcggagctgattccacctattttgtgactaacggcacctctacctctaacaagattgttttctttggccgtgtgaccgccgatgacatcgtgttggtggatcgaaactgccacaagtccgccgagcatgctttgaccatgactcatgctgttccagtgtacctgattcctacccgtaaccgatatggcatcattggtccgatccaccccgaagagttctccccagaaaccattaaagcgaagatcgcggcatccccattgaccaagaagttgaagaacaagaccccaatccattcaatcattaccaactccacctacgatggtctttgttatcacgctgagtgggtggagaacgaattgggcaagtccgtggattcgatccacttcgacgaagcatggtacggctatgcgcgcttcaacccaatgtaccgcaatagatttgcaatgagagacggtgcaaagaacccaggcggcccaaccgttttcgccacccagtccacccacaagttgctggccgctttgtcccaggcatctatggtgcacgttcgtaacggccgagtgcctatcgagcactcccgtttcaacgaagcctttatgatgcactcttccacctctccattgtacactatcattgcatcgtgcgatgtgtccgccaaaatgatggacggagcttccggccgtatgctgacccaggagccaattgaagatgccatccgattccgtcgaatgatggctcgcattaacagagaaatcggcaccggcaagactgcaaatgactggtggttcggcatgtggcaaccggattttgtcaccgatccatccaccggcaagaaaatggatttcgccgacgctggcatcaacttgttgggcaaggagccgtcgtgctgggttctgcaccccgaagattcctggcatggctttaccgaccttccagatgactactgtatgttggacccaatcaaggtgaccgtcttgatgccaggcgtgaaggatgatggcaccccagctgactggggcattcctgcggcaatcgtggtcaaattcctggataccaagggaatcgttaacgaaaagtctggcgactacaatattttgttcttgttctctatgggcatcaccaagggcaagtggggcaccttggtgactgagctgttcgagttcaagcgacattgggaagaggaaaccccgttggaggaagtcttccccgatctggttaaggagtggcccgaacgttacggtggcatgaccttgccaggtctggtgaacgatatgcacgactacatgaagaaaaccgagcagggcaaattgctgcaggaagcatacgaaaagttgccagagcaggtcatgacctacgcggaagcatatcgttgcctggtccgaaacgaggttgaacacgttgcggtgtccgatatggaaaatcgtattgtggcaaccggtgtcttcccctacccaccaggcatcccagtgcttgctcccggcgagtctgctggcaagaagaagggcgcgatcattaagtacttgttggcactgcaggagttcgataaaaagttccctggctttgagcacgacatccacggcgtcgaaaacgttaacggtaaatacatgatctattgtctgaaggaa

SEQ ID NO: 260 - DNA, 3093 bp, Eimeria brunetti
atgaacggccgccaacaccttttctatgtccttgtccttgtgcccccttgtacctacttgaagaaagaccaccgactgaaccttgcctctgagctgcgacgcatttcttctaccgagaccctgaacccatccccaaacccagatgaaggccttgaatatcgtatcgtcgaggtggattctatccgaaaggcactgctggcagtcatcattaacccggagatcttggcagtctgcattcaggacaacgtgccaatggagtccaacgccggtccgcccttgtctccactgtctcgcctgtctggtttcgttcgcggtcttgcgcgtttcgtcgaaggtcccctgtccaagattcgtttgggtgcaccaccattgcctaccttgattgagggcctgaactcttcccgacgtggccttgacatctattgtgtctgcaccaacatgggtcttaccaccgcgggtcccgttgatcacctggtccgtcgagcctttgtgcccaccgaagatcactccgatcttcacgaggcacttattgaaggtgtgcgtgcgaaggctcgttgtccattcttcggcgcgctgcgtgcgtacgctcaacgtccaatcggtgtttttcacgcgctggcagtctctcgtggcaactctttgcgccgttccaaatgggctcaccgacttttggacttctacggtgcagcactttttaaggcggagtcttctgcaacctgcggtggcctggactctcttttggacccgcacggctccttgctggaagcgcagcgcctggccgcacgtgccttcgacgcctcctatgcgttctttgtgaccaacggcacctctacctctaacaagatcgtcctgcaagcattgacccgtccgaacgacgtcgttttgatcgatcgcgactgtcacaaatcccaccactacggcctggtgctttctggtgcacgcccgtgttacttggatgcatacccgctgcacgcttattccatgtacggtggcgtgaccctgaagacccttaagcgtgccctgttgggctttcgcgcggaaggtcgtctgcaagaagtccaggtgctggtccttaccaactgcaccttcgacggtattgtttacaacgtgaaacgtatcatggaagaatgcctggcgattaagccagacatcgtttttctgtttgatgaggcttggttcgcgtacgcaggctttcaccccatcctgaaaacccgtaccgccatgcactgtgcgaacgagcttcgtaaggagttgatggaacgtaagtaccaccacttgcacgcggcgctgttggaccgactgcaggtgtcctccctggacgcggctcccgcatctgcgttgctgggcctgcgtctttatccagatccccttaaagcacgagttcgcgtgtatgcaacccagtctacccacaaatccttgacctctctgcgacaaggttctatggtcttggtgaacgatgacaaatttgagtctcacgtccacaccgcgtttaaagagtcctactattcccacatgtctacctctcccaactaccagattttggcgaccctggatgtgggccgttcccagatggaacttgagggctacggcctggtcgaacgacaaatcgaagcagcgtttcttattcgaaacgcactgggttccgaccccttcgttaacaagtactttcgtattcttggcccccacgatatggtccctgcttctttgcgacaatcctctttgcagcaatcttccggtaacaagaccgaaaacggccgtatgaacgtccaatccctggaagaagcgtggctttccgatgacgagttcgtccttgacccaacccgaattaccttgtacaccggtcaatctggtctggacggtgacacctttaaggagcttgagatgcgccgcctgttgtcctcccgtcgagagttggaagaactgcagaagcaaattgattggatcgtgaaggattgcccagcactgccagatttttccggttttcacccggtttttgcaatccttccacagcaacagcagcaacaacagcaacaccagctgcagcaattgcagcagcagcttcaacagcaacaacagcttgtgcagcaactgcagaaacaactgcaacagcaacgtttgggtaaccgtaacgcggcggcaggtgctgccaccggtgaagcaaccaccggtgcagcggcaggtggcgcggctgcggcagctgcaccagcagcggcagctgcggcagaaaccgaagacgaaggtgagaaggaagaggaagacgatgtttccccagtgtctaccccaacctctattgacggctccgtgaaaaaggagaacatgaacaagggtccctctctgaacctgggtcttaaccttaacccgtatcttaacctgaacaagcaacagctgctgcccctgccgaactgcacctcctcttcctcctcctcttcttcttcctcctcttcttcctcttcttcctcctcttccgaagatgactatttcaaagaatctgtgcgtgacggcgacgtgcgcgagccgttttacttgtcttatgacgaagaaaacgtggaatactattccttgcagcaagcactggaccttatccagaagggcaagatcttggttggctctaccttcatcattccttatcctcccggttttccaatctctgtccccggccagattatttccgcggctatcgtggagtttatgatcaaaatcgatgtgaaggaaattcacggtttcgaccccaaacttggcctgcgttgcttcaaggaatctttgattaactccttgatgcaatcccgaggcatcaaactgcaacaacaacagcagcagcaacaacagcagcagcagcaacaaccgcagcaaccacagcactacgatatttccggtgaggcagaagaacaagaaaacaacaactcctcttcccccaccaccaccgcctctcttttgcgactgcccgatcccaaccaacgtttgcagcaggaactgcagcaagagctgcagcaggagcttcagcaagagttgcagcaagaattgcagcaagagctgcaacaggaacttcaggaacttcaacaagaacttcagcgtcaacagcaacagcaacaactg

SEQ ID NO: 261 - DNA, 1095 bp, Yersinia enterocolitica
atgtccggagagcgtatggtcggcaaggttttctacgaaacccaatctacccacaaattgctggcagcattctcccaggcgtccatgatccatattaagggcgattactccgagtctaccttcaacgaagcgtatatgatgcacaccactacctctccaaattatggcatcgtggcatctatggaaaccgctgcggcaatgatgcgtggcaaccctggtcgtcgaatgatcttgcgttccattgaacgagccatgcacttccgtaaggaagtgcgtcgtttgcgaagcgaatcagataattggttctttgacgtttggcaaccagaggacatcgacgaaattgcctgctggccgttgcaacccggtcaggcttggcacggcttctcccatgccgatgctgaccacatgtacttggacccaatcaaggttactattctgaccccaggcatgtctcatgaaggtgcgctggaagaggaaggcatcccggccgctcttgtcgcaaagttcttggatgagcgtggtattgtggtcgaaaagaccggcccatacaacttgttgttcttgttctccatcggcattgacaagactaaagccatgtcgttgctgcgcggtctgaccgatttcaagagagcttttgacttgaacttgcgtatcaagaacatgcttccagatttgttcgcagaagatccagacttttaccgtcacatgcgtatccaggacttggcggcaggcatccacaacatgattcgacagcatgatttgccacgcctgatgcgtaagtccttcgacgttttgccggaaatgaaactgaccccatacaacatgtttcagcaacaggttcgtggcaatatcgtggcctgcgatatggctgacctggtgggcaaggttgtggccaacatgatccttccttatccacctggcgtgccattggtcatgcctggtgaaatgattaccgcggaatcccgcgcagtccttgatttccttctcatgctctgtgcgatcggcgcacgttacccaggctttgaaaccgacatccacggcgctaagcgcgacgaacatggccgttactgggtgaacatcttggacaccaaacag

SEQ ID NO: 262 - DNA, 2265 bp, Polynucleobacter necessarius
atgaaatttcggttcccgattatcattatcgatgaagactttcgaagcgagaatatttcaggcagcggcattagagatcttgctgaagccattgaaaacgagggggtcgaagttattggcctcaccagctatggcgatctgacatcatttgcacaacaagcatcaagagcatcaacgtttattgtctcaatcgatgacgaagaatttgattctgactccgaagatcatgaccttccggcgttaaataacttgcgcgcttttattacagaagttcgtaaacggaatgaggatattccgatttttctgtatggcgaaacaagaacatcaagacacatgcctaatgatattctccgtgaactgcatggctttattcacatgaacgaagatacaccggaatttgttgccagacatattatccgcgaagcaaaagtgtaccttgatagtttagcaccgccgtttttcagagcactgacgaactatgcatccgaaggctcatactcttggcattgtccgggccactcaggcggcgttgcatttctgaaatcaccagtgggcagaatgttccatcaatttttcggagaaaacatgctccgcgcggatgtctgtaacgctgtagaagaactgggtcaactgcttgatcacacaggcccggttctccagagcgaacgtaatgcagcgcggatttttaacgcggatcatctgtttttcgtgacgaatggcacatcaacaagcaacaaaatcgtctggcactctacagtagctcctggagatgttgtgttagttgatcgtaattgccataaatcagttattcactcgatcaccatgatgggcgcgattccgatctttcttatgcctacacggaatcatctgggcattatcggacctattccaaaagaagaatttgaatggaagaacattaaaaagaaaattgatgttaacccgtttattaaggacaaaaacgtcgtaccgcgcgtgatgacactgacgcaatcaacgtatgatggtattgtttacaatgtggaaatgatcaaggagatgttggatggaaaagttgacagcctccattttgatgaagcgtggctgccacatgctgcctttcacccgttctataaggatatgcacgccattggctctgaccgaaaaaggacaaagaaatcactgatgtttgcaacacaaagcacgcataaactgttggccggactttctcaagcatcccaggttttagtgcaggatgccgaagacgcaaaactggatcgtgactgctttaatgaagcatatctgatgcatacatcaacatccccgcagtacgcgattatcgcttcatgtgatgtcagcgcagcgatgatggaatcaccgggcggcacaacgcttgtagaagagtccattgcagaagcgatggattttagacgcgcgatgcgagaggtcgatgacaagtttggtgctgattggtggttcaaagtatggggaccggaccatcttgccgaagaaggcattggggaaagatctgattgggttctggaaccgtccgccccttggcacgactttggcaaactggcaaaggatttcaacatgcttgatccgattaaagcaaccgttgtgacaccgggcctggatattgagggtaactttggctcaatgggcatttcagcgtcgatcgtgacaaagtatttggctgaacatggcgtcattgtagagaaatgcggactgtactcatttttcatcatgtttaccattggaatcactaaaggtagatggaatacactggtcacggaacttcaacagtttaaagatcatttcgacaagaacgcccctttatggaaggttttgccagaatttgtggcaaaacatccgcgttatgagcgggtgggcttaaaagatatttgtcaacagatccacgaattttacaaatcaagagatgtcgcaaggatgaccactgaaatgtacacgtcagacatgattccagcgatgatgccgagcgaagcatgggccaagatggctcataaacaagtcgatagagtaccgttggacagactggaaggacgcgtcacagcgatgctggtaacgccttatccgccgggcattccgctcctgattccgggcgaacgctttaacaaacggatcatcgattatttgtactttgctagagacttcaacgaaaaatttccgggcttcgagacagatattcatggactggttaagacgtctgtggacggaaaatccgaatattacgttgattgtgtgcgacaggagagggacattacactt

SEQ ID NO: 263 - DNA, 6582 bp, Plasmodium malariae
atgaactccgtgaatgactccatgtactctggcgataccaactccctccacgtgaactccttgtatgaaaacaatcctgataagtccgttaaaaacatcaatgcagtgaacgactacattacctcttctaacgccatgtccgaagaggctgaaaccgcagccggcaacgatgaactgatcccaaactcctcctcctaccacattcattcccagtgcaagcaacgtcaccagtataaacaataccatcagtataacccacacaatcaacataagcagtaccaccaaaacaaacagtaccatcaatataacccgcacaatcagcataagcaacaccatcagtacaagaaacgtcacccctacaaacaatatcatcaggaaaaggagttgctgaaatatcagccgttgccccagtaccaacacagcacccagtatcaaggctccatccctcactcccagtctcaactgcatgatggcggcaagaagcgtcgtgagaagggtaaagtggaacgtaacaagtacgacaaaatcgaagagttggagaagtatatcaacattaacaatgcgaccaacgtctgctcccttcgtatcaagttgtgggaggcattgatgctgtacgtcaacaacttgaacatcgaactggtttacttcatcatctactgtctggaagagattgaagtgtactggggcgaagaggcgaccgacaaccttcgtgacatcatcaacttgatcaacgataagaaatacaaggaagtgttgaacaaaattggcgaaaccttgtcctccttgtccgtgaccactggcaagaccactgaagagaaccctttcttttacaccctgatcgtgtccggccgtcgtgatgagaacaataataacaacaacaacaactctaacaataactacaactataataacaataacagcgaccttgcatgcgaattgaacaagatcttgcactacgaacataatcgtcttagcaaccaatcaaacaacaagaaattggagtacaagatcattgaagcatccaacgcgaaggaagcattgttggcctgtttgattaacccgcagatcctgtctgtggtgttggtggataacttgaccatcgatgaagagaaggttaaagagcgtgattattacaagttcaacgaagacaacattctgaacgctaattgcgcaaactcctcctacttgctgaactgtaacttgcagaataacacccagatggtcatgaagaacccactgaaccacaatggcatgatgcattccggcggcgtgaccactgtgcagtcctccaaggatgtccttctcatcggtaactccatgttgcctgagtacctgaacaacaacaacgtgaacatcaacgaaaactctaacgtccgttccttgcgttccttgtacatcaagcgtaactacaagttcgacattggcgatttcgtgatcggttacgagcagttggtgtccgcgccacttgaaaagatgaagaaaggcttcaacatccttgtgatcttgatcaagtccatcgcatacattcgttcctccgtggacatcttctgcgtttgtacctctattaccttggacaagctgcattctgttaacaacaaaatcatccgtatcttcaccactcacgatgaccattccgatttgcacgagtctatcttggacggcgtgaagaaaaagattaagaccccattctttaacgcattgaaagcatacgccgaacgacctatcggcgtgttccacgctctggcaatctccaagggtaactccgtccgtcgatctcgctggattcagtccttgttggatttttacggcgtcaacttgttcaaggccgaatcctccgctacctgcggcggcttggattcattgttggacccacacggctccttgaaggaagcccagatcatggctgcgcgtgcttacggctccaaatattgtttctttgtgactaacggcacctcttcttccaacaagatcgtgatgcaagccttggtcaaacctggcgacatcattctggtcgatcgagcttgccacaagagccaccattacggtttcgttctttcccaggcattgccatgttacttggacccatatccagtgtcccgttacggaatctatggcgctgttcccatctacgtgattaaaaagtctttgctggattatcgtaactccaacaagttgcacttggtcaaacttctcatcttgactaactgcaccttcgacggcattgtctacaacgttaagcgaatcattgaagagtgtctggccattaaaccagaccttatcttcttgtttgatgaagcatggtttgcatacgcctgcttccaccctatcctgaagttccgcactgcgatgaccgtcgcagagaaaatgagatccaaggaacaaaaacgtatctactacaaggttcacaaaaagttgctgaaaaagttcggcaatgtgaagtccttgaaccaggtgtccgccgataagttgctcaaaaccagactgtacccgaacccctccgaatacaagatccgtgtgtatgctactcaatctattcacaaatctttgacctctttgagacagggctccgtgatcttgattcgtgatgacaactttgagtcccatgcgtacaccccgttcaaggaagcatactatacccacacctctacctctcccaactatcaaatccttgcaaccttggatgcaggccgcgcccagatggaactggagggatacggccttgtcgagaagcaaaccgaagcagcattcttgatccgtaaagaattgtcggaagatccaatgatttcccgttactttcgaatcctgaacgcggaggaccttatccctgattcactcagacagtgcgcagtgtcctacatgaagcgtaaaaagaaaatcattaaagaatacgattcctccgattcccgttgctcggcgaacgttacctactcctgtgtgtctaataacaatacccgcggcatcgtcaacccatcggattccggcaagtactatttgtctggtgaacagaacgttgtgcacagcgttaacgcatggctgatggacaagtacggcatccagatcaacaagacctctatcaactcagtgttgttccagaccaacattggcaccactggctcctcctgcttgttcttgaagtcctgtttgtccttgatctcccaagaattggatcagaagaagtccttgttcaacgagcgtgaccttaaccagtttaacgaaaatgtgttcaacttggtgtccaactacatcgatttgagcgagttctccgagtttcacccattgttcaagaagcgttataccgatcccaagatcttcaacaaagagggcgacattcgtaaggccttttacttggcttatgaagaggattacgttgaatacatcttgctgtccgacctgaaggagcgtattcgacagaacgaaatgatcgtgtctgcatccttcatcattccgtacccaccaggcttcccagtcttggttcctggccaaattgtctcccaggaaatcgttgattatttgtcgggcctgtccgtgaaggagatccacggctacgacgaaaacattggcttccgttgcttctacaacttcgttttggattacttctacaacatggtcatctccgatccatactcactgtatcagaagattgataaagaaacctacgagaagttgaaacacatgtcactgtcgaagcgtaagtccttggaatccgtgtgctacttgtatatctacgataacgaatccaacaagatgaagaaagtttacctgtgctcgggcaacgtgtccaccgaaaacaataccatcgtgtccgacacttgtgatgaaattacccagaaccacgcccgtcgttcctacaacaagaagggcaagcaaacctctatctatgaaaacttctccaaatctgctcagaacgcgggaaatgcatctggcgtcgttaacgtgagcggcaagatcggtaacatcatctacggcgataacttcaacaattgcgctaacggcaaggacatttgtcaccacttgtatggcaaggaagaagaaggcttcttcgacgtgaacgatgaaaatgccttctccaacgatgtcttgcacctgaaccattacgctatcaagaacccactgaagaaaggcaccactgaaaccttcatcaagaagacctgcaaccagaagtcctcctggaaggaaaagatcaccgataaataccacggcaccccaaacggcacccgtcgagacaagcacaacgtgttgtcctccaagaagaaggaaaacggtcgtaagtgtaaaggcatccaggttaataacaataataataataacaacaacaatgtgatcttgattaacagcgagtcctacgatcacgatcagaaggtcatcgacctggtcgataccccagaaaagtccaacaaaaattatgaatgccatgaggatgacggccgagataacgatgatgatgatgatagacactccggcggcggctccaactacaatcgtgattcctccaacaattcccacaacgtcgatcgcaagagatatgtggtcggcaccgacaaacactccggcggctccaacactcataatgttggcaccgataagcattccggcggctccaataataacaaacgctccttggagcgtaagaagaagcgtaacgaaggcaattacatgtcgctgtcctataaggccaacatctacggacacaaagttgtgttcaaccgaggtaataacaataacgacgatgcgaatgtcaaggcatacaacgagaaggatggcaagggcggcgaacgcaataacaattgcaccttctatgacaagaacgttaatggtatgaaccgtgagcgatccctgaaaaacatcagctacatgtcaaacatctcggaaattcgtggtatgaacaatgtgaacaatgtccgtcgtaagaaccgaatcgacgagggcaaggatcgcaacattaaaggcaccgacgattcggattacttgttgtccgaagtcaccgcgaatatgtccaagaacatcggcccaatctccgacatctactcgctgaagaaaatctctaagttgaaccgtagcgacgatggtaaatacgaaaactctctgagcgattatgttcccaagttgaagtcctccaatatcgtgatctacaacaaggtgaagaagaacgcattgctgatgggccgtaagcacatgtccgatggtaaatctcgaaacaatcaccatcgtaagaactcccacatgaaccagaagtccaacaaggactacgtctactattccgattcctctaagaaaatcaacgaaatcatctacatgaagcgacaggacggcgatttgaccgaggaaaacgctattgttcgcgagaaccttaatgaattgaactccaacttgttctactcgaacggtatcggaaacaagggcggccacattaagggttccgaaaagaactcctccaacaatagcggcaccttgtcaggcaccaacaatggaaacaattccaactactctatccagaatttcgcgaacgttaatgaaaaggcaggcggcatcacctttaccaccccaaacattgtggaagatgagtactgcgacaagaaggacatccctattaagcgtggcaacaattccggtgacaacaatggcttgaactccggctacaattccggacacaacggcgtgcataactcctgtaatgattcctccaacaagccgatcattaacgagggcaccggttacaacgacagctatcactcagaccaggatgccaacaagtccaatgaggaaaagtacaaatctaacggcttgatccaccccagcaacttggaaagaaacatcattctgggtaacgagatcattgttgaaaaggataacaacttgtgctaccgtaacatcagcggccacaacctgaatgaaaccaactcctacgtgtacgccaacgacggcaccattgctgaaggtcactacggaaacaataacatggctcgtggttccaacattggatgctctgacgacatcgaaggctccgaggacattgaaggcggcgaagacatcgaaggcggtgaggacattgaaggcggcgaagacatcgaaggcggcgaagacattgagggtgcggacgacatcgagggagcagacgatattgaaggctcctacaacatccgtggctcctccaacatctacatgggcaactctaatgcaatctccgatgctgcgcaggtgtccggctccgtgaacgacgcaaatatctccaacttgatggtgcacgtcaaggatgaaattggcttttgcggtaaaaacttcctttactccgaaaacgaattgaagatgaacgcattgttgcgagaggaagagaaggacaagtccaccatccgcaacttgaataccctgaacaacaactcctacatcaacaacttgatcactaacgtggacgatgacaccttcatccacaaggaaggcaacttctttctggaatgcactcttaccaactccgagatgaactgctcctccttcgaaatggatatgtctgtcaacaatatctacccaaacggcggtgagcacgttaagcagcatcgtaagtacgatgacgatttgaagaaagagttc

SEQ ID NO: 264 - DNA, 2184 bp, Escherichia coli
atgtgctgggaaggcccattcttgccaggcgatatgaccatgaacgtcatcgctattttgaatcacatgggcgtttacttcaaggaagaaccaattcgtgagctgcatcgagcgcttgaacgcctcaactttcagatcgtctaccccaatgaccgcgatgacttgctgaagttgattgaaaacaatgctagattgtgcggcgttatcttcgattgggacaaatacaacttggaattgtgtgaagagatctccaagatgaacgaaaacttgccactgtacgccttcgctaatacttattcgaccttggatgtgtccttgaacgaccttcgactccagatctccttctttgagtacgctctgggcgcagccgaagacatcgcgaacaagattaaacaaaccactgacgagtacatcaacactattttgccacctctgaccaaagcattgttcaagtacgtgcgcgagggcaagtatactttttgcaccccaggccacatgggcggcaccgcattccagaagtccccagtgggctccttgttctacgatttctttggcccaaacaccatgaaatccgacatctccatctccgtgtccgaattgggctccttgttggatcactccggcccacataaggaagcggagcaatacattgcacgtgtgttcaacgccgaccgttcgtatatggtcaccaacggcacctctaccgctaacaagatcgtcggcatgtactcagcgcccgcaggctccaccatcctgattgatcgtaactgtcacaagtctcttacccacttgatgatgatgagcgacgttaccccaatctacttccgccctaccagaaacgcatacggcatcttgggcggcatcccacagtctgagtttcaacacgccaccattgctaagcgtgtgaaagaaaccccaaacgctacctggccagtccacgcggttatcaccaactccacctacgatggtttgctgtacaacactgacttcattaagaaaaccttggatgttaaatccatccacttcgactctgcatgggtgccatacaccaacttttcccctatctacgagggcaagtgcggcatgtccggcggccgtgttgagggcaaagtgatctacgaaacccagtccacccacaagttgctcgctgcgttctcccaagcctctatgatccatgtcaagggcgatgttaacgaagaaaccttcaacgaggcttacatgatgcacaccactacctctccacactatggtatcgttgcatccaccgaaaccgcagccgctatgatgaaaggaaacgcaggcaagcgtttgatcaacggctctattgagagagccatcaagttccgtaaagagattaagcgtttgcgaaccgaaagcgatggttggttctttgacgtctggcagccagatcacatcgacactaccgaatgttggcctctgcgatcagattcgacctggcacggcttcaagaacattgataatgagcacatgtacttggacccgatcaaagttactttgctgaccccaggcatggaaaaggatggcaccatgagcgacttcggcattccagcgtcaatcgtggcaaaatacctggatgagcacggaatcgtggtcgaaaagaccggcccttataacttgttgttcttgttctccatcggtattgacaagaccaaggcattgtccttgctgcgagcccttaccgatttcaaacgcgcctttgacttgaacttgcgtgtgaagaacatgttgccatccctgtaccgtgaagatcctgagttctatgaaaacatgcgaatccaggagctggcacaaaatattcacaagttgatcgtccaccataaccttccggatttgatgtaccgtgccttcgaagtgctgccgactatggtcatgaccccatacgcagcatttcagaaggagttgcacggcatgaccgaagaggtttacctggatgaaatggtgggtcgcattaacgctaatatgatcctcccttatccgcccggtgtgccgcttgtcatgccaggcgagatgatcaccgaagagtcccgtccagtgttggagttcctgcagatgctttgcgaaattggcgcacactaccctggctttgaaaccgacatccacggcgcctaccgacaagctgacggtcgctataccgttaaagtgttgaaggaagagtccaagaaa

SEQ ID NO: 265 - DNA, 2253 bp, Marinobacterium sp.
atgaaatttcgtttcccggttgtgattatcgatgaagactttcgaagcgagaatatcagtggctcaggcattagagatctggccgaagcaattggtaaagaaggcatggaagttgtaggctttacaagctatggcgatctgacatcatttgcacaacaggcgtcaagagctagctgctttatcctgagcattgatgacgaagaatttggttcaggctcagatgaagacgtctcaattgccttgaaggcaatcagagatttcatcacagaagtaagaaagcggaataacgacatcccgatttttctgtatggcgaaacaagaacatcaagacatatctcgaacgatattttgcgtgaactgcatggctttattcacatgttcgaagacacacctgaatttgttgcccggcatattatccgtgaagcacggaaatacctggattgccttgcaccgccgtttttccgggcgttaatggattatgctagtgactcaagctactcgtggcattgtccgggccactctggcggagtcgcttttctgaaatcccctgtaggccaaatgttccatcagtttttcggagaaaatatgctgcgcgccgatgtgtgcaacgcagttgatgaactgggccaactgcttgatcatacaggaccggtgtctgcgtccgaagctaatgcagcgcgtatctttaacgccgatcatcttttctttgtcaccaatggcacatcaacatcaaacaaagttgtgtggcacagcacagtagcacctggagatattgtcgtagttgacagaaattgtcataagtcaatccttcacagcattatcatgaccggagccattccagtctttttaatgccgactcgaaaccattatggcattatcggaccgattcctaaatcagaatttgatccggaaacaatcagaaagaaaattgaagcgaatccttttgccagaaaagcaaagaacaaaaagccacgcatcttaaccattactcaatcaacgtatgatggtatcttgtacaacgttgaaacgatcaagtccatgcttggaaacacaatcgatacgttacattttgacgaagcgtggttgcctcatgctgcctttcacccattctatagaaatatgcacgcgattggcgaaggcagaccgagaagcgatgaaacactggtctttgctacccaatcaacacataaactgttggcgggcctgtctcaagcatcacagattctggtacaggatggaacaaatcgaaaactggacacgcataggtttaacgaaagttatctcatgcattcatcaacatcaccgcaatacgcgattatcgcttcatgcgatgttgcagcggctatgatggaaccgccgggcggcaaagcgcttgtggaagaatcactgcatgaagctctggattttagacgcgccatgcacaaggcagacgaagaatttggtaaagatgactggtggttcaaagtgtggggaccgcttccgcagtctgaagaaggcgttggcgatagagatgactgggtgattcatgaagatgacacatggcacggctttggacgcatcgagtccggcttcaacatgcttgatccgatcaaatcaacaatcatcacgccgggtcttaatttaaacggggaatttgatgaggacggaatcccggccgcaattgtcagcaagtacttggctgaacatggtatcatcatcgagaagacaggcctgtactcatttttcatcatgttcaccatcggtatcactaaaggcagatggaatagcatggttacggaactgcaacagtttaaggatgactatgatcataacttaccgatgtggcgggtgatgcctgaatttgcggctaaacatccgcaatacgagcgaatcggcttaagagatctgtgttctgcgatccattccgtttacaaggaatacaacgtggctcgcatcacaacggatatgtatcttagcaacattgaacctgccatgacaccggcggatgcttgggccaaaatggcacatagagatgtagaacgcgtttcaatcgacgaactggaaggaagagtcacagcaatgttagtaacgccgtatccgccgggcattccgctcctggttcctggagaacgctttaatgccacgatcatttcataccttaaatttgcacgtgatttcaacagccggtttcctggtttcgaaacagacgttcatggcctggttcgtgaatctgtggatggcgaggaccggtattttgtggatgtggtcaaagac

SEQ ID NO: 266 - DNA, 1161 bp, Sporomusa sp.
atgaagtacttccgtttgagccagaacgccgtgaaagcgctggcagatacctattctaccccattgctggtcttgtccttggaacaaatcgagttgaactacaacttgttggctgagaacatgccaggtgtgaagatctactatgccgtcaaagctaatcctgacgagcgcatcgtcagaaagattcacgaactgggcggttacttcgatgttgcgtccgacggcgaaatgcagatgcttaaccgcatgggtatcgattcagccagaatggtttatgctaatcctatgaagaccgcatcgggcttgaaagtggcccatgctgttggcgtgaacaagttcacctttgactgcgaatccgagatcggtaaaatggcagccgctgagccaggcgcgaccgttttgctgcgtattcgagtggataacccacacgcattggtggatttgaacaagaagttcggcgcacacgcagatgaagccctggcattgttgaccaaggcgcaggcggcaggtcttgatgtggcaggcttgtgctttcacgtcggttcccaatctaccgacaacgccgcttacttggaagcgctgaaaacttgtcgtgagttgttctccgcggcagccgaacgtggcatgaacttgcgtatcttggacatcggcggcggcttcccaatccctaccctgactgaagaaccagacgtcgccgttatggctgcggagatctacaaggctgtgcgtcagtatttcccggaaaccgagatctggtccgaacccggccgatacatttgtggcaccgctgtcaacttgatcacccaagttattggcaccaaggaacgtaacaatcagcaatggtacttcttggatgacggcttgtatggcaccttctctggcgtcatctttgatcactgggacttcgaattggaaaccttcaagactggcaagaagatcccagcgaccttcgcaggcccttcgtgcgattcccttgacattatgtttcgcgataaaccgaccgttcccttggagatcggtgaccttattttggtgccaaactgtggcgcctacacctctgcgtcagcaactgtgttcaacggctttgctaagacccagatcgtggtctgggaagaggtctatgaagagattaaggccaaattggaactggcagccgctgtt

SEQ ID NO: 267 - DNA, 6747 bp, Plasmodium ovale
atgaatacggcgaacgatgctatgttctactcagctaacaacttcgtctacgccgtaaatttctcagaaaacaacccagagaaggaaacaaaatcaatgaacgaaggaaacgattgcattccgtcaagcaacgcattatcagaagaactgggtagcgtggcagaacgcgacgaggtcgcgtccaatgattcaatttgcagaaatcgcaacgtgtcccgtaatggaaacgcaaattcaaacatcatcacgaatcttagcaaaaaccaatctgccattcagtcttccatcaattccgctattcatagtgccatccattcatcaatccaaaattcaatccagtcaagcattcaaaacgtcatcccgtcaacatcaagacatcactataaagatgcgaaggacttaagccagaagtggaagaaagaagaatcttaccaaatcggctccagacgccgtgagaaaaataggttgaaatcttccaagtacgagaaaattaatgtactggaaagatacatcaacatctctaacgctacgaatgtttgctccctccgcattaaactgtgggaagccttgatgctctatgtgaacaaactgcatcttgaatttgtctacttcatcctcaactgtctggaagagatcgaagtttattggggcgaagaagcaacaaacaacttgcaggatattctcaacttggtaaacgataagaaatacaaggacgttctgtacaagattggcgaaatcctgtcatcactgtcagtgacaacgtcaaaaagcacggaagagaatccgtttttctatacccttattgtcagcgccaaacgtgacgaaaacaacaacaacaacaactacaactcggatctttcatgcgaactgtctaaaattatccagtacgaacataaccggttgtcaaaccaaaacaacaataagaaactggaatacaagattatcgaagtttcaaatgccaaagaagcactgcttgcgtgtctgattaactcgcagatcttgtcagttgtgctcgtggataatctggtcattgacgaagagtttacaaaggaaaaggattacttcccgtacatcgatgacaacgcacttaacaataactgcgtgaataacagctatctgttgaactgtaacaccacaaattcaactcaaattaaaacaccgctgagccataatatcggtaataacggcggctcaccgggcaacaaagatacagtcagaggctcactttcaagctgccgccataacattagcaatggccagatgtgcaatcatggccaaatgtgtaatcatgagcattcaagatcatcaggatctgaatccaaacggcaatcatcatttctgctgaagcgagattataaattcgaaattggcgactttgtgttgggatacgatcaactcgtcgcagcaccgctggagaaaatgaagaaaggctacaactcactggttattctgattaaaagcattgcgtacatcagatcaagcgttgatattttctgcgtctgtacctctatcacactggataaacttcaatccgtgaacaacaaaatcatccgcatttttacaacgcatgatgaccacagtgaccttcatgaatcgattttagatggagttaaaaagaaaattaaaacgccgtttttcaatgctctgaaaagctatgcagaacggccaattggagtatttcacgctctggccatcagcaaaggcaattcagttagaagatcaagatggattcagagccttttagatttctacggagtcaatctgtttaaagcagaatcttccgcgacatgcggcggcctggattctttgttagatccgcatggctcactcaaagaagcacaaattatggctgcaagagcgtatggctcaaaatactgctttttcgttacaaacggcacatcatcatcaaacaaaatcgtaatgcaggcacttgttaaacctggcgatattatcttagtggacagagcgtgccataaatctcatcactatggatttgtcctttgccaagcattaccttgttatcttgatccgtacccggtttcaagatatggcatctatggagcagttccgatctatgttattaagaaaacactgcttgaataccgcaatagcaacaaactgcatctggtgaaactgttgattcttaccaattgcacttttgatggaatcgtttataacgtgaaacgtgtcgtagaagagtgtctcgctattaaaccggacttaatctttttgttcgatgaagcctggttcgcgtatgcatgtttccatcctatccttaaatttcgcacggctatggccgtggcagataagatgcgtagcaaggaacaaaagaaagtctactacaagatccataaacgtctcctgaagaaatttggcaatgttaactctcttcacgatgtcccggtagactatcttctcaagacaaggctctaccctaacccaagcgaatataaagttagagtgtacgcaactcagtctattcataaatcactgacatctctgcggcaaggatcaattatcctgatcagcgatgacaattttgaatcacatgcttatacgccgtttaaagaagcatattacacgcacatgtcaacatcgcctaattaccagattcttgcgacactggatgctggccgcgcccaaatggaactggaaggctatggactcgtggaaaaacaggtcgaggcagcgtttctgatccgtaaagaacttagtgaagatccgatgatttcaagatacttccggatcttaaacgcagaagatttgattccagactcactccggcaatgcgcagtttcatacatgaagcgcaaaaacaaaatctactcaaaagaaggatcaccgtcactgtctaaatgcagcgataacgtcacatactcctgtatcagtaacaacatcgcaaaacgcgcgacggatcaatctgaaaacaccaagtaccgtatttgccataagaaacctaactttagctcttgtgaaggcgtacacgaagttgtggagtcagcaacgggtcttggggttacattttcaaacgattcacatatcagcaatggtttcgtttcatcaggctcaggcagatatgaatcctgtaacccagcgagaggcaatcgtctgcgggaaggtcatcttcgagaggggaggttccaggaaaaccacttttctgggaatgacccgcaaatgtcaagagttacagatggcaagaaaaagaaaaagaaaagaaacgatatttcatcagttacgcatgatgacgataattctaacgattccacaaattcagagaatgaatgctttagtatcgaagagtcaagagaaaacaaaaacggaaattgctcttgtaacagctctaactatctgaacaattttctggaatacttcgagtgttcgtggttatcagaggatgaatttgttttggacccgacacgcattacactgtttacaggttattcagggatcgatggcgacacgtttaaagtgaagtggcttatggataagtacggcattcagatcaacaaaactagcattaattctgttctgtttcaaacaaacatcggcacaactggctcatcatgcctgtttctgaaatcatgtctgtcactgatttcacaggaacttgaccaaaagaaaacactgtttaatgaaagagatttgaaccagtttaatgaaagtgtatacaatcttgtttcaaactacattgaattatcacaattttcaggcttccatccgctgtttaagaaaagatacagcacatcatcaatttttaacagagaaggcgatctgcgcaaagcattttatctggcgtatgaagaagattacgtcgtatacatcttgctgctggatctgaaggagagaattaaaaagaaagaaatgatcgtttccgcgagctttattatcccttatccgcctggattcccagtcctggttccgggccagattatcagcgaagagattgtggactatttgtctggactctccgtcaaggagattcatggttacgatgaaaacatcggctttagatgcttctacaacttcatcctgaactacttctaccacatcgtgacgtctgatccgtatgcgtactaccagaaaatggataagaaaacgtatgataaactgaaactgtcatcactgaacaaaaagaaaaatacagacgacatctatcatctgtatatctacgataaggaccgcaacaaactgaagaaaatctatctgagaaacggccgcaatgcatcaacagacaataacacaacagtttcagatagctatgaagaagttacaagctgctctattccacatatcggcccggttagaagatgtgtcccggcaatttcatcagtttcagcagtttcaggcggctcagcaattggccgtatcgatgcgcaaaaacagtgctctgagaaagaagataacttctgtgacgttaacggggaaaatggcttgtcaaacgatatttcatcactgaacaactcagaaaacacgtcaccgcaaaagaaatcatcaacagaatctattattaagaaaggacattacaatgaatccacgatgaaaggcaagaaaaatctgcggaaatatatttcagtgcctaataacatccgaaccgatgaatacaacgtctttctgagcaaaattaaagaaggcgaatttgagatcatcggaacgccgaaaaatgataaccgtaactttcttgttaacagcgcaaactgctactacaataagaaagcgaaggatctgatccggcagacaaacggctttaagaaaatctataaggaccatactcatctgtgcacagaagataatctgattgtggatcgtgacatctgtaattcatcaggatcaaacggtcaaaaccatttcgaaagaaagaaaaatatgattaaaaacgatctgccgttgagcaatcgggaagaagttggcatggaagttgagaactgggaagaagcaagaatcggaacagcgaactgggagaaagtacctaatggtgaacatctttctaacgttgtttttaagaaacacagaggcgatgttattttcgaagaagatagactttcagtacgccgtacttgtaacgttggtatctctcatcggttatcaggcagaagaagaggaaatgtcagcacagcaaacccagaaaatgcaattttacaagcgggacaggttaatgcggtgcggtctaagccgggtaaaggcacaggccgtggagttggtaaaaatcggaacggcattatcactgaaagaggcaacattccgaatggaagcatcacaaacaaacagaacatgctgtactcattttcagatgtgtactctattcggcaagtcggcaaaatgaacaacaaagatggcgaaaagtacgaccatattttgacggatgtcgtacctaaaatcaaacagtctaacatcatcctgtacaacaaaattaataacaattctatgttggtacaacgaaaaaggctctccaatgttaacgattacacatgcaatctgaacgagaaaaataaccataaggaatacagaggaaaagacttcgtatgttactcggattcaaataagaaaaacaaaaacgtcatgtatgtaaagcacgaagaagaatacgttaaagaagaaagcgatcaggacattaacgaaaacatcttcgagtacaacaacaaactgtttagagttaacagagttattggcaagaaagaagatgataacgggatcggcagcacaggcgttattcgcggccataatatcgagatgtctcgttgcctggagtttacacaagggcagccgacaagagaagaaaagaaaggcagggatatgcactcaaatgtcaacagcgtatctaacgttagaaatctgactaacggctcatcatcaatgggcaatagaattagagctgggattatcggcaacagatcaagaggcagaacaagagttaagaaacagtctaatagatcttccatgcaagaacctctggcccatgtgagctatcttccagaacagaacatcaagagaaacgtcgaggaaatgtacattgaaggagagccgatcagagaacgcgatacggagcaaaacgtgtttatcagtaaagtcccttcggaacgcgatggcctcaatggaaaaggtctgtcacatacccactgcccgaatgaagctaaaagccataactatgccaatgaaaacatgtgtactgacatgaattacgtgacaaaagaaggagatatggagggtgttgtgaatgggaacgctcacgaatatcctaatgagggatcaaacggtcttgttaatgtgttagccaatgataatagcagctttaaatcatcacaaaaatcatcagattcatcaaattgccgcgatgaatgggggcaaatgggcgacgtacatttgaactttgttggaaatgatcagggacatggcaaactgaatacgcaagagaaaattgaaaccgagatctgtagatcatcatttccgtttaatgaaaaggaactgaacaaagatccggtccttttagaaaacgctggagatagaaattcaccgagaaaactgaacacgcttaacaacaactcatacatcaacaacctgatcactaacgtagacgatgacacattcgttcataaagaaggcaatttctttctggaatgcgccatgacaaacagcgaaattaattgttcttcctttgaaatggatatgagcctcaacaacatctattctcatgatggagacggtatcgggcaacacatgcacagaggcggcgataagaaaggcgagtttaaa

SEQ ID NO: 268 - DNA, 1425 bp, Dethiosulfatibacter aminovorans
atgaaattgggcgaagaactgaaaaaatatagagaagcaggaacggcgcgctttcacatgcctggtcacaaaggcatttcatcatgcctggaagaagttttcgtgcttggtaatgatgttacggaagtggatggcctggataaccttcataaaccaacaggcgttattaaggatctgcttgaagacatctcaggcgtttatggaagctacaaaacactgatttctacgaatggctcaacatcatcactgcaatcagcaattcttggtgtgacaaaaccgggagattcaatccttgttgacagaaactgccataaatcagtttacaacgcgatgatcctcggcgatttgaaccctgtctacttaatgccaaaatgtgatgaagagtcaggcttgagctggatcgaagacctcgctggactggaagagagcattcgggccgatgaaaaaatcaaggcagttgtgctgacatatcctacgtactttggaatttgctgtgatatggaaaaaatcgccgaaacagtccatcgttatgatcggattttaatcgtagacgaagcacatggctcacatctgagattttgcgatagtttaccatgttcggcgttggatgctggagccgacattgtcgtacaatcaacacacaaaactcttccgtctttaacgcaatcatcactgttgcatattcgggatgaaaaacacgtcgaaggcgtttcagacatgatcagcatgctcctgacatcaagcccgagctatttaatgatggcttctattgaagcatcagttgatttaatggaccgagaaggctcatcaagactgaaagcaaatatggattgcgtagacaagatggcggatcgttatgaaaacgctggtcggatttttagaaaacgcgattacttcatcaagagaggcgttcatgactttgatgacactcgcctgctgtttaaaacatctgaaattggcgtggatggcggcagagcagaatcaatccttaggaaagagtataatgtccaagtagaaatggccgatactaattacgttaacgcatttatgacagcgtgtgatggagcttatgacattgaaagactgtttgcagcggttaacgatatggtgcttaaatacggtatgacggcggatgacgaaaagaccggctcagaagatgaagcatcaatgccgtgcacaatggaatgtcctgagatggccatgaatatgcgtaaagcattttacagtgagaagacatcagttgatattatcgacgctgtaggtgaaatttgcgggtgtcatatcacaccgtatccgccgggcattccgttgctctgtccgggcgagaaaatcacgggacagcttgtcgaaagaatcatcaaaatttcaaaatcaggaatcgaagtaatgggcctggaagaaggcaaaattaagattatcaaaatc

SEQ ID NO: 269 - DNA, 1389 bp, Prochlorococcus marinus
atgtcaatttcatcatttctgacgaaaaaattcctgaaatcactgtttttcccagcacataaccgtggagcagcactgccgaaaaaactggttaaactgcttaagaaccatccgggctattgggatttgcctgaactgccagagatcggatctccgctttctcaatccggtttaattgcaaaatcacagcgtgaattttcggacaaattcggtgcaaaggggtgctttttcggcgtcaacggagcgagcggtttaatccaaagtgcagttatttcaatggcaaatccgggcgaaaatatcctgatgccgcggaacgtccatatttcagtaatcaagatctgtgctatgcagaacatcaaccctattttctttgatctggaatttagcaccgttactggacactataaaccgatcacgaagatctggttggataacgtgttcaagaaactgaacttcgacgaaaacaagatcgctggcgttattcttgtgaatccttcttatcatggctacgccggcgatctggaaccacttattgactgctgtcatcagaaaaatctgccggtcttggtagatgaagcacatggctcatattttctgttttgcgagaacctcaatctgccgaaaccggctctttcttccaacgccgacttggttgttaattcactccataaatcactgaatggcctgacacaaacggctgccctgtggtacaaagggaaccttatcaacgaaggcaacctcatcaagtcaatcaacttattgcagacaacgagcccgtcatcactgctgctttcaagctgtgaagagtctatcagagattggctgaacaaaaaatcactgtcgaagtaccagaaaagaattttagaagctaagatcatctacaagaaactgatccagaaaaatatccctctcattgaaacacaagatccgctgaaaatcgtgcttaatacatcaaaggcaggaattgatggttttacggcggacaaatttttctatcgcaacggcttaattgccgaattgccggagatgatgaccctcactttttgcctgggcttcggaaaccaaaaggattttctgaatctttttgaaaaactgtggaagaaactgttgctgaatagcaaaaaatcaaaatcactggaagttttaaaatccccgtttaagttcatccaggctcctgaaattgagatcgggattgcctggagatcagaaacaaaatccattcctttttctgaatcactgaataaagtctcaggtgatattatctgcccgtatccgccgggcattccgctgcttgtacctggcgaaaaaatcgatcttgacagattcaactggatcaacaaccaatcactgtgtaacaaggacttggttaattttaacattaaagtgtta

SEQ ID NO: 270 - DNA, 1545 bp, Cryptosporangium aurantiacum
atgacagctgtagccttgccttcaggagatagaccagttctctatgacgcagcgcatggcagcgctccgttagttgatgccattatcagatatagaggctgcgaaacgggtgccttgcatgttccgggccatgcaggcggcagaacagttggaccgggcctgagaaatctgcttggctcaacatttctggctagtgatgtctggcttacacctgcagacgcgacaacggccagacgcgaagctgaagcactggctgccaaagcgtggggatctgatgaagcactgtttctgctggatggctcatcaggcggcaatcgcgcagttcatttagcgcaacagcaaaatccgggcgccgatcatgttgtggtcgcacgtgactctcacacatcaacacttgcgggcctggtactgagcggtgctacaccgcattgggttacaccgagactggatcagggcggatttggcatttcactgggcattgacccgatctcattagatagagcgcttacagacttagcagcgacgggccatagagcatcactggtttcaatggtttcaccgggctatgctggtgcgtgttcagatgtacgtgcattagctgccgttgcgcatcggcacgatgctccgttgtttgtggacgaagcatggggcgcacatctgccgttccacccagatttgccggagaacgcaatttccgctggcgccgacgtagctgttacatcagcccataaaatgctggcagctccatctggtgctgcacttatcttagtcagaggcgaaaggattgatgcggggagaatcggccgcaccgtacagatgactcaaaccacatcaccgctgctgccagttcttgcctctattgatgaagcacgtcggacaatggtgagcagaggacgcatccttttagatcggacattggacctcgttgcagatgcgagaagaagactggcagcgattccgggcgttagagtcgctgaagccgaggatctgggcgttccgagagaacggtttgacccgctgcgtcttgtagtttcagtacggggcttaggattgacaggcctggcactggaaaaactgctccgtacaccgggaccgggcctgggcacgagcggactgcttcatcctgcagtagcggttgaaggcagcgatgagtctaatctttttgttgcgatcacaacgtgcacgtctccggatgtggttgatgcactggtgacagcgttgagaacactctcctgtcgccctcgtcggcgcctgcgcccggcatgggatggacagcttgtggctgccttattggcaccgagagaacaagtctgcacaccgagagaagcgcattttgcagcgacggaaaacattccgctggaacgagcggtgggcaggacatcagctgaaccgatcacaccgtatccgccgggcgttccggctgtcatgccgggtgaacgtttagatcgggacgccgtggctgcactggaaagagcagtttcaacagggatgcatattcatggcgcagcagatccgacattagctacggtgtccgtcctgagagat

SEQ ID NO: 271 - DNA, 6657 bp, Plasmodium knowlesi
atgaactccgctaatgatgcgatcttctacggcgaaaagaactccgtgcactgtaatgacttgtccgagtctggtccagatcgttgcgtcaagaacggcgacatgcagaatgattacatcatgtcgaacgacgtgacctctgaaggcgtggacattaccgtggacccaggcgagaacggcgtggtcaatgcagcctacttggatacccctttgcaccagcacttgccaccacaccgtggcgaacgaaagaaaaagcaatacgccaagaccgagcgtgacaaatatgatcgaatcgaagaattggaaaagtacttgaacatctcaaatgctaccaacgtgtgttccttgcgtatcaagctgtgggaagcgttgatgctgtacgtcaacaatgttaacgcagagcttatctacttcatcattaagtgcttgatggaagtggaagtgtactggggcgaagaggcatccaacaacttgcaggacatccttaacttgatcaacgataaaaagtacaaggaagtgctgaacaaaatcggcgaaaccttgtcctctctgtccgtgaccactggcaaggccaccgaagagaacccattcttttacaccttgatcgtgtcctcccgtcgtgacgaaaacaactcaaactacaactcggatcttgcttgtgaattgaacaagattttgcagtacgagcaaaaccgtttgtccaatcagaacaataacaaaaagctggagtacaagatcattgaagtgtccaacgcaaaagaagccttgctggcttgcctgatcaactcccaaattctgtctgttgtgcttgtcgataacttgtccatcgacgaggattaccgtcgtgagggcttcgaattttataacttcagcgaagaaaactccttgaataacaagtgcggcatgctgaacggcggtatggtgtccggcggcatggttaacggtggcatggtgaactccggcatgatcaacggcggtatggtgaatatggcgtctatgattaatgtcgcgtctatggcaaacggcggcgcacagatgaagccgcccttcacccactccatgcataacggctcctcctccaactcccgtgatgcaatgagaaacatcattttgtccaattatcgtggttgcaacggaaataacggctctgtgtgtaataactactgcggtggcggcggccagtacggaaacggtcaatatggctccgccccatctgctaataaccctaacggctccggctccgcattgttgaatgaacacaaaaagggtgcaaacttgctgatgaaagactacaagtttgacatcggaaacttcgtgctcggctatgaacagttggtcgctgcgccactggagaagatgaaaaagggcttcaactctcttgtgatcttgatcaagagcatcgcgtacattcgttcctccgtggacatcttctgcgtttgtacctctattaccttggataagctgcaatccgtcaataacaaaatcattcgtatcttcaccactcacgatgaccattctgaccttcacgaaagcatcttggatggcgttaaaaagaaaattaagaccccgttctttaacgcccttaaagcatacgccgagcgacccatcggcgtgttccatgctctggcaatctccaagggtaactccgtccgtcgatctcgctgggttcagtccttgttggatttttacggtgtgaacctgttcaaggcggaatcctccgcaacctgtggcggcttggattcattgttggacccacacggctccttgaaggaagcacaaatcatggcagcccgtgcttacggctccaaatattgcttctttgtcactaatggcacctcttcttccaacaagatcgtgatgcaggccctggtcaaacccggcgacatcattcttgtcgatcgtgcttgtcacaagtctcaccattacggtttcgttttgagccaagcgctgccatgctaccttgacccgtatcccgtttcccgttacggtatctatggagcagttcctatctacgtgattaagaaaaccttgttggaatatcgcaactccaacaagttgcacttggtgcgtcttatcattctcactaactgtaccttcgatggcatcgtgtacaacgtcaagcgtgttattgaagagtgcttggccatcaaaccggacttgattttcctgtttgatgaagcatggtttgcatacgcctgcttccacccaatcctgaagttccgtactgccatgaccgtcgctgataaaatgcgtaaccaggaacaaaagcgaatctaccacaaggttcataagaaattgctgaagaaattcggcaatgtgcgttccttgaacgaggtcccagcggaaaaacttctcaagacccgtctgtacccaaaccctgatgaatacaaggtgcgagtctatgcaacccagtccatccacaagtccttgacctctttgcgtcaaggctccgtgatcttgatctccgatgacaactttgaatcccacgcgtataccccattcaaggaagcatactatacccacatgtctacctctcctaactaccagatcttggcaaccctggacgctggccgcgcacaaatggagttggaaggttacggcttggtggaaaagcaggttgaagctgcgttccttatccgtaaagaattgtcagaagatccgatcatctcccgttactttagaaccttgaacgctgaagacctgatccccgattcccttcgtctctgtcacaacttgtacatgaagcgtaaacgaaagtgcactaaggaaggctattcgaccgattccaaaggttctatcaacggcacctacagctgcgtgtcaaaccaccagggcaaggcatccaccactaccaaagaaaagcgttctaaggcgctgcgtatggcacgaaaaggccgtcgttccggcaccaataacgaacacaccatccagtcctccaacatctcctcccatgagtgtgtgaacgacactaccggctgcaccaataacgtcgttcgtaactccttcatctttggcgatttcaccaataacaattctgtggtcgaaggcggcatcaacgactttggtaatgatccacgtggctacgtcaagatgaacaaacgcaagtcccgtcgagacgagagaaacggcaaggaaggcggcacctctggcaccatcgatgacagcaacaatggctccatcattttgaactccgagaacgaaaatatttctttcgttcacgatcgccataacagaaattacaacggctcctcctacgaaatcgaaatgaagaactttctggagtacttcgaatgctcgtggctgtccgaggacgaatttgtccttgatcccactcgtatcaccttgttcaccggctattccggtattgacggcgataccttcaaagtgaagtggttgatggataagtacggcatccagatcaacaagacctctatcaacagcgtcctgttccaaaccaacattggcaccaccggttcctcttgtttgtttctgcgttcatgcttgtccttgatctcccaggaattggaccaaaagcgctccctgtttaacgagcgtgatttgaatcagttcaacgatagcgtgtacaacttggtgtccaattatatcgatctgtctgagttctccgaatttcacccattgtttaagaaacgttactccgaccgtcgtattttcaaccgcgaaggcgatttgcgtatggccttttacttggcttatgaagaggactacgtggagtatatcctcatgtccgatttgaaggagcgtgtgcgtcagaacgaactgattgtgtctgcatccttcatcattccttatccacctggtttcccggttcttgtgcccggccagttgatctcccaagagattcttgaatacttgtcaggcttgtccgtgaaggagatccacggttacgatgaatctatgggcttccgatgcttctacaacttcattctggaatacttctacaaccttgttacctctgatccatacgcatactatcagaaaatggataagggcacctatgagtccttgaagtgtgctaacctgtcgaaacgtcgcagcatggataactcttacaacttgtacatctatgataatgaaaccaaccgtatgaagaaaatgcacggatgcaacggctcctcctccatctacaacaatacctctatctctgacacctacgaggacatcgtccaggtttataacgcccgctccgatcacggccgtcgtaaccaccatcacaatgaataccacggccgtcaccaccatcaccatcaccatgttagcgagtacgattcagtgaacaataactccacctctaccatcccaaccttgccacacggcggcgcagttggcgaatcctctgtgaagggcttgcacggctccgccaaatctggcaaggagcgtgacgctcctcgaactatggatggcacctctaactctgcaggcgtgtccaatcacaacacccgtcgaggctccggtgaagagggcttccagggcgtgtccgagatgaataacgaacaagcgatctccaacggcaccggcggctccttgtccgaacgtaacattggcaagtcccgtgcaaagggctccttgaaagagtcccgtatgacccacgtggaacagaacaagaccaacatctacgaccaccattccaacggcatggtccgatatgatcagaactcctccttggtgtccaaagtcaaggaaaacgttttgatcgtgaaaggcaagattggctacgcatcttgcggagtgggagagcgtagcgctaactaccgttatcgagatgacccgttgccctccgttccaaagcacaagaaagaaaagaaatgcaaaggctgtaagtcgtgcgatggcggcaagtccaaccatgtcgccctggttaaacgtcgtgcacgtgcagaccgaatccctcagaagcgagaagatgcttacaacttcgagagcgaacgctcaaacgaggatgacattcacaaagagcgtaagcagcatcaatcccgtgcgctgaacggtcgagttgtgaagaagggcaagaagaagaacgcgtctgtcggtgcatccggccgtgatgttgcatgcggagagtccgaaaccaataacactgaagagatcaccgaagagattactgaagacatcaccgaagagattgccgaagaggttgctaaggagaacgaaaagaagaacaaggaagaaggctccgtggattccaactcctccgacggcgatactaccatgccagaagaggacggcgattctgcaagcgccatgaaggaacgtcgtcacggcggcaaggctcagaacgtcgagggcaccgattcaggctcctacaacaccaaaaagaaaggttccatccgcggcaaggtgcgtaaacagaagggcaatcgcaacagaaatttcaaccgtgaatgtaaccgagaaaccgacgaatccaataacgtgcaatctgatgtgaccgtcaataccttcaacggcgcaaactccatctccgagattcactgcatgcgcaaagaaaagcgtaacgacatctccgaggatgaccgttataagaacggcggcaagggcgaattgattccgaaaacccgaaagtcctaccccgtcatgtgtaaccagcttggcaagtctggcttgcgcatgaagatgcagcgtaagtccgccccaggcgactcacactggaataaccctctgtcttacgttgataacaagaactacagctatcgtagcggctccaagaacaagggtaatgagatggaatgcaccaagggctcctccaaacgagaagataactacgcaggcggcgcatcccgtggcaactcccactcctcccgtcgttcctcctccatgtcctcctccgagaactaccagtcctccgaatccttgaagggcggcggctcccactcccatgctggccgtaagtcctccaccggcttgtctggctccgaaaaagcaaaccgttccaccacccgatctgtgggcaagtcctccaagaagaacgaagaggaagttcacaaccgtgtgaaggaaatgaactccccgaatggctccatgcgcaacggctccaatgaaggtgcacccttgaaccgtaagatcttcatttcccaggaagacatcgataaagtttctgtggacaaccaaaccggcggctccgataactcctccgagaatcgtgttacctctgaaaataacctgtctcacaatagcgacatcattaactccggagaagatgtgtcaggctccgcgaagcgtggtgcagagtcccgtgtgtcctcccgtatgaatgttaacggtaatgacggaaataacggcaccccgaacactgagggcaagggagaaatcgccttctgtggtaacgaataccactatgatggcgatgacatgaaggtgaactcctccgcacgtgaaaataacgaattggaaaagaactgcatccgcaagttgaactcccttaacaacaactcctacatcaacaacttgattactcacgtcgatgacgataccttcatccataaggaaggcaacttctttctggaatgcgcacttaccaactccgaaatgaatggctcctccttcgagatggacatgtctttgaacaatgtgtatagcaacggcggcgatggcgatcgtcaccctggctcctacggccgaggcaagaagtccgatttcgaa

SEQ ID NO: 272 - DNA, 2355 bp, Betaproteobacteria bacterium MOLA814
atgagacaggtgccgtgcggacataccctggtcttttatactgaatggcttgtacgttcactgcttgatacaaacatgaaatttcggttccctatcgttattatcgatgaggactttcgaagtgaaaacacgtcgggtcttggcattagagcactggcacaggcgattgaatctgagggtgtagaagttttaggggtgacatcttatggcgatttgtcccaatttgcacaacagcaatcaagagctagcgcgtttattttatccatcgatgacgaagaagttacgcaaggaccggatattgaccctgcagtcgagagactgcgcggttttattgaagttgtgagacgcaaaaatgcggatgtaccaatctatgttcatggagagaccaagacatcaagacatattcctaacgatgtgttgcgggaactgcatggctttattcacatgttcgaggatacaccggaatttgtcgctcgacatattatcagggaggccaaatcctatctggaaggcattcagccgccgtttttcaaagcactgctggattatgcggaagatggctcatactcttggcattgccctggccactcaggcggcgttgcatttctgaaatcaccagtgggacagatgttccatcaatttttcggtgaaaatatgctccgcgctgatgtgtgtaacgccgtcgaagaactgggacaactgctggatcatacaggtccgatcgctgaaagcgagagaaatgcagcgcgcatttttaacgccgatcactgctttttcgttacaaatggcacatctacgtccaacaaaatggtatggcatcacacggttgcaccgggcgatgtcgtagttgtggatcgtaattgtcataaatcagtattgcacgctattatcatgaccggagccattccggtttttctgaaacctactcggaaccattatggtattatcggaccgatcgctcagagcgaatttgagcctgaaacaatccgtgagaaaattcggaataacccgcttttaaaggattacgacgccgatacagtagaacctcgtgttcttaccttaactcaatctacgtatgatggcgtactttacaacacagaaacgattaaaggaatgctcgatggatatgttacaaacttgcattttgacgaagcatggctcccacatgctgcctttcacccgttctatggcacataccatgcaatgggcaaaaatcgtgagcggccggaacatgcggtcgtatacgtaacgcagtctcttcacaaattgctcgcaggaatttctcaggcgtcccatgtgttagtccaagactccaaaacagttaaactggatacgcatctgtttaacgaagcgtatcttatgcacacatcaacatcaccgcaatacgctattatcgccagttgcgatgtggcagcggctatgatggaacctccggcaggcacagcgttagtcgaagagtcgattctggaatgtcttgattttcgtcgggctatgcggaaagtcgccaaggactatgggaatcaggattggtggtttaaagtgtggggaccgaaggtcaacgaattgtcagatgacacggacgagggcatcggagaacctgctgattgggttctgggtatgggcaaagacaataactggcatggctttggagacctggctgatggctttaatatgcttgatccgattaaagccacaattgtaacgccgggactggacgttgatggtacatttgcagaaacgggcatcccggcgagtattgtgaccaaattccttgccgagcatggggttgtggtcgagaaaacaggcctctactcatttttcatcatgttcaccatcggcatcactaaaggaagatggaataccctgcttactgcacttcagcagtttaaagatgactatgatcgcaatcagcctatgtggaagatcctcccagaattttcaaaggcgaataagaaatacgaacgaatgggattaagggatttgagccaacatttgcacgctatgtatgccaaacatgacatcgctagagtgacaacggacatgtacctttctgatcatacaccagcaatgacgccgggagatgcatttgcgcacatcgcgagaagaaccactgaaagagttccgattgatgacttattgggcaggatcacaacgtcattaattacaccttatccgccgggcattccgctcctggttccgggcgaagtctttaatcagagaatcgtcgattacttgaaattttcaagagaactgagcgcgcaatgtccgggctttgaaacagatattcatggcatcgtcggcattctggatgacagcggcgtaaaaagatttttcgcagattgtgttcgcgcgacg

SEQ ID NO: 273 - DNA, 1425 bp, Salimicrobium jeotgali
atgacccgacacgagaaagcgccgctgtgggaagcagtgaaacagtaccgtcacggcaaggcgggctcctatcacgtgccaggccataagaacggcaccgtgttcgatactgaagcacgtgaagtgttccgtgaagtgttggaaatggacaccactgaaatcccaggcttggatgacctgcactccccacgtggcgcaatcaaggaagcagaagaattggcacgcctctacttcaagtcggaaaagacccgtttcttggtcaacggctctacctctggaaacttggccatgatcctggctgtttgccgtcgaggctctccagtcctggttcagcgtaacgcacacaaaagcatcttgcacggcattgagctggctggtgcgaagccggttttcttggcccccgaatgggatgctcgtaccggcaaatactcctctcttaccccagagcgtgtgcgtgaaggtctgcgacagtttccggaagcagtggccgtcatcgttacctaccccgactatttcggccacacctttaaccttagcgccattacctctttggtgcatgaggctggcaagccagtgctggtcgatgaagcacacggcgtccatttctccttgcaccgtgattttccagacaccgctctggcagctggagcagacatcgtggtccagtctgcccacaaaatggctccagcgatgactatgggcgcttacttgcacactcagggtccactggtgcctgaaaagcgtctttcttacatgctccaggttgtgcagtcctcctccccgtcgtatccagtgatggtgtccttggatttgtgccgtcgttacatggcgatgtggaaggaagatggcttgctgaccttccttgacgaagttcgtgaagaattggatgcctgctgtgacggttgggaagtgctgccagcttccccacaggatgacccgttgaaagtggaactgaagccccgtcgagtcgatggcttcacccttgcctcaatgttggaagaacagggtatctatgcagaaatggccaccaacaccggcgtgcttctcaccttcggcttggaacgtccagagtcctgggaaaatgacaaagctgcgttttacgaggttgcccgtttgctgcagaagcgagaaaagcacgataagatcatcgacaacaacatttccttcccacctgtccagcaattggatgctcaatatgaagagatggaggacctgcagcaaacctgtttgccactggagaacgcggtcgaacacatcgcagccgaagcagttattccatacccgcccggcatccctcttattctcaagggcgagcgtatccgacaggagcaagtggaacacatccgtaccttgattgaaaacaaggcggtgttccagaacgagaatatcgaaaaggcagtcaccatttttcaagaagagtggtcc

SEQ ID NO: 274 - DNA, 2130 bp, Aeromonas veronii
atgaatattatcgccattctcaaccatctgggcgttttctttaaagaagaaccgatccgacaacttcaagcatcactggaaaggaaaggctttgaagttgtgtatccggttgatgtggccgacctgcttaaactgatcgagaaaaatccgagagtttgcggcgcaatttttgattgggacaaatactctctcggactgtgtaaggagatccatgatcgtaatgaaaaactgccgatttttgctttcgccaacgatcagtccacattggacattcatctcacggatcttagactcaacgtgcatttctttgaataccgcttagggatggctgatgacattgccttgaaaatgggtcaagccacccaggaataccaagatgcaatcttaccgccttttacaaaagcactgtttaagtatgtcgaagaaggcaaatacacattttgtacgccgggccacatgggcggcacagcattccaaatgagtccggcaggctcaatcttttatgacttctacggtcctaacgcatttaaagcggatgtttcaatcagcatgccagaattaggctcactgctggatcattcaggcccgcacaaagaagcagaagagtatatcgcgcgtacatttaatgctgatcggtcatacattgtcacgaatggaacaagcacggctaacaaaatcgtagggatgtattcagcaccggcgggcagcacggtccttgtagaccgtaactgtcataaatcacttacacacctcatgatgatgaacgatgtcacaccgatttattttcgtcctactcggaatgcctatggcattctaggcggcattccgcagagtgaattttcaagagatacaattgcagcgaaagtagctgccacaccgggcgcacaagcaccgagatatgctgtcgtaacaaattcaacgtatgatggcctgctgtacaacaccggttttatcaaagaagcgcttgacacaccgtacattcattttgattctgcttgggttccttatacgaatttctccccaatttacgagggtaaatgcgggatgagtggcgaggccatgcctggcaaggtgttttatgaaacacagagcacgcataaacttttagcagcgttctcacaagcaagcatgattcacatcaaaggagatgttgaagaagaaacattcaacgaagcatttatgatgcatacatcaacatcaccgcaatatggcatcgtggcatcaacagaaattagcgctgccatgatgcgaggaaatactggtaaaaggcttattaaggattctatcgaccgagccatttcctttaggaaggaaatcaagagactccgcgaccagtctgagggatggtttttcgatgtttggcaacctgataacattgacacagtggaatgttggaaacttgatccgaaggatgactggcatggctttaaggaaatcgatgacaatcacatgtatcttgaccctattaaagtcaccttgctcacaccgggcatgggaagagatgggcaactgcttgaaaaaggcattccggcatctctggtatccaagtttcttgatgagagaggaatcgttgtggaaaaaacgggtccttataacatgctgtttctgttttcaattggaatcgatcagtcgaaagcgatgcaattattgagagcactgacagaatttaagcgcggctatgacctgaatcttacgattaaatctatcttgccgtcactgtatcgggaagatccgtcattttacgaaggaatgcgtatccaggaactggcgcaacggattcatgaacttacaagcaaatatcgcctgccggaactgatgtttaaagcatttgatgtgctgccggaaatgaaaatgacaccgcatgcagcgtggcaacaggaactggcgggtaacgtcgttgaagttccgcttagagatatggtgggccgcatctctgctaatatgattcttccttatccgccgggcgttccgttagtactgccgggcgaaatggtcacacaggatagcttaccggttctggaatttctggaaatgctgtgcgaaattggcgcacattatcctggcttcgaaacagatattcatggcctgtatcgtcaagcagatggtagctacacggttaaagtgttgcgg

SEQ ID NO: 275 - DNA, 1446 bp, Tepidanaerobacter syntrophicus
atggaaaagcaggagatcaacaagttcagcaagacaccgttaatccaagccttgaaggaatacgaaaagaaagattctcttcgattccacatgccgggtcacaagggcagatgccctaaaggcgtcttttgtgatattaaggaaaatctttttggctgggacgtaacggagattccgggattggatgactttgcgcaaccagaaggcccgattaaagaagcacaggagaaattgagcgccctctatggagcagatacatcttactttttagtcaatggcgcaacgtccggaattatcagtatgatggctggcgcactgagcgaaaaagataagattctgatcccgcgtacatcacataaaagcgtattatctggcctgatcctgacgggagcgtcagcagcgtatattatgcctgaacggtgcgaagaactgggcgtttacgcccaggtggaaccatgtgcaatcaccaacaaactgatcgagaaccctgatattaaggctatcctcgtcacaaatccagtatatcagggtttttgcccggacatcgctcgtgttgccgaaattgcaaaagagcggggcacaacgctgcttgcggatgaagctcaaggtccgcattttgggttctcaaagaaagttccgcaatctgcgggcaaatttgcagacgcgtgggtgcagagcccgcataaaatgctgacatcactgacgcaatcagcttggctgcacatcaagggaaacagaattgataaagaaagactggaagactttctgcacatcgtgaccacatcatcaccgtcctatattcttatggcatcactggatggtacgagagaactgatcgaagagaatggcaattcatacattgaaaaggccgttgaactggcccaaaaggcacgctacgaaatcaacaactctacagtgttttacgcaccgggccaggaaatccttggcaaatatggaatttcttcccaagatcctcttcatttaatggtcaatgttagctgcgccggttatacagggtacgatattgaaaaagcactgagagaggacttttcaatttatgcggaatacgctgatctgtgtaatgtctattttcttatcaccttctccaacacactggaagacattaaaggattattggccgtcctctcacacttcaagcctttgaagaacaaagtaaagccatgcttctggattaaggatttgcctaaagtcgcactggaaccgaagaaagcatttaaactgccagcaaaatcagttccgttcaaagactcagcgggctcagtttcaaaaagaccgctggttccgtatccgcctggtgctccgttagttatgccgggagaaatcatcgaaaaggagcatatcgaaatgatcaacgagatcctgaactccggcggatactgtcaaggagtgacatcagaaaagttcatccaggttgtgactgatttc

SEQ ID NO: 276 - DNA, 1131 bp, Unknown
  Description of Unknown: Mine drainage metagenome sequence
atgaccgataagatctcccgtttcttggcgtccgcacagccggaaaccccatgccttgtggtggatttggatgtcatcgctggcaactaccacgcgctgcgtcattatttgccactggccgaagttttctacgcggtgaaagcaaatccagcccctgaggttattgctttgctggcgggcttgggctcctcttttgataccgcatctcgcccagaaatcgaggctgtgctggcagcaggcgtggctcctggccgtatctccttcggtaacaccatcaagaagttgaaggacatcgcctgggcttacgaacgtggcgttcgactgttcgcatttgatagcgaagccgagttggacaagctggctgaggctgcgccgggttccaaagtgttctgccgtcttctcatgacctgtgaaggagcggagtggcccttgtcccgaaagtttggctgtgaagcagatatggcgcgtgcacttatgctcaaagcccgagctttgggcttggtgccatacggcttgtccttccacgtgggctcccagcaaacccgtcttgatcagtgggatttggcaattggccgtgcagcagcattgttccgtgatttggcggcagagggcatcgcgctggcaatgttgaacttgggcggcggcttgccagctcgttaccgagatgacgtggcacccgtcgaacgatatgccggtgctatcatgcaggccatgaccgatcatttcggaaatgacttgccacaaatgattactgagccaggccgttccttggtgggcgattcgggcatcttggaaaccgaagtggtgttggtgtcccgtaagtccttcgctgatgacgaaagatgggtctaccttgatgttggcaagtttggcggcttggctgaaactatggatgaggcgatcaaatatcgtttgcagttggtgggcggcggcgaaggcccatccggcccagtggttcttgccggccctacctgcgattcagctgacattctgtacgagaagcaccagtatcaaatgccgttgtccttgaaaccaggcgatcgtgtgcgtatcttgtccaccggtgcatacaccacctcttacgcagctgtgaacttcaatggctttgcaccactgaaggcctacttcgtc

SEQ ID NO: 277 - DNA, 2133 bp, Plesiomonas shigelloides
atgaacattgttgccatccttagcaatgtggacgcgtattttaaagaagctccgcttcaagaattagatattgaactgcagaaaagaggattccatgttatctatccatctgacgcagcggatctgcttaaagtcattgaaaataaccctcgcatttgcggcgtaatctttgattgggacaaatatggactggacctttgtaaggatatttcagctatcaacgaaaatctgccgttgcatgcgtttgctaacaacaactcagtgttagacattaaattgggacatctgagactgaatctgtcatttttcgaatatcatctggatattgcggatgacatcgctcttaaaattggccagaaaagagacgaatacgtcgatagaattttaccgccgctgacaaaagcactgtttaaatacgtacatgatggaaaatacacattctgcacgcctggtcacatgggcggcacagcatatcttaaatctccagttggctcaatcttttatgacttctacggtgccaatacgttaaaagcagatatttcaatcagcgtggcggaattgggctcactgctggatcattcaggcccgcacaaagaagcagaagagtatatcgctcgtgtttttaacgccgatgcatcttacattgtgacaaacggcacatcaacagcgaacaaaatcgttgggatgttctctgctccttctggctccacagtgcttattgatcggaattgtcataaatcactgacgcatctgatgatgatgtcgaacgtcaccccaatctattttcgtccgactcggaatgcctatggcattctaggcggcattccgcaatcagagtttaaaagagaaacgatcgaggcaaaaatcaaaacaacgcctaacgcccagtggccaatctatgcagttgtgacaaattcaacgtatgatgggctcctgtacaatacgggctttatcaaggacacattagatacgaaattcattcatttcgattccgcgtgggttccgtatacaaacttccatcctatctatcaaggcaaatacggcatgtcaggcggcggcattccgggcaaagtcgtatacgaaacccaatcaacacataaactgttagctgccttttcacaggctagcatgattcatatcaagggagatgttgataaggaaatttttaacgaagcgtttatgatgcatacatcaacatcaccgcattatggcatcgtagcatcaacagaaactgcagcggctatgatgaaaggaaatacaggcagagcactgattgatgcaagtgttcagagggccgtgagatttcgcaaagaaattaagaaactgcgggcagagtcggacacatggtttttcgatgtctggcaaccggacgaaattcaggatgcggagtgctggaacctgtctcctaatgacaaatggcatggctttaaagatattgacgctgatcacatgtatcttgatccgattaaagtaacaatcctcacaccgggcctggataaggatggcaacttggaagagaccggcattccggccgcactggtttcaaagtttttagatgaacaaggaatcatcgtagagaaaacaggcccgtataatatcctgtttctgttttcaattggcatcgataaacctaaggcgatgcagttgctcagagggcttaccgactttaaacgcggctatgatctgaacctgaaagtgaagactatgttaccgtcactgcatgcggactcaccgcatttctacaaggatatgcgcattcaagaattagctcagggcatccataaattgacaattaaacacgatctgccgaaaattatgtttcatgcgttcgaagtcctgcctcaaatggttattccgccgtatcaagcatttcaggaagttctgcagggtaatacagttgaagttccgctggaagatatggtgggcaaaatcaacgcaaacatgatcctcccttatccgccgggcgttccgttgattatgcctggtgaaatggtcacagaagagtcaaaaccggttctggaatttctgaagatgcttgtggagattggacgtcattatccgggcttcgaaacggatattcatggctgtcatccgcacgatgacggccgttacatggtcagcgtacttaaacgg

SEQ ID NO: 278 - DNA, 1134 bp, Azospirillum brasilense
atgacggataaaatcgccagatttttcgaagaacaaagaccgcaaacaccgtgcttagttgtggatttggacgtcgtagaagcaaattatcatgatctggaagaagcactgccggacgcaaaaatcttttacgctgtgaaggccaacccggcacctgaaattttaggactgcttactcggttgggctcagcgtttgatacagcatcagttccggaaattcaaatggtgcttgcagcgggatgtgcaccggaaagaatttcttatggtaacacgattaagaaagaagcagatattagacgcgcatttgaacttggagtcagactgtttgcgttcgactccgaagctgaactggaaaaaatcgcgcgtgctgcaccgggcgcaagagtgttttgccgcattctgacatcaggggagggcgcggaatggcctctgtcaagaaaattcggatgtgatctggcaatggcgcgggaattattgctcaaagctaagggcatgaatgttgttccgtatggcgtttcatttcatgtgggctcccaacagaaagatttgatgcaatgggaccacgccatctttcaagtcgcacaactgtttagagaactggaagttcttggagtagatctgggtatgattaacctgggcggcggctttccgacgcgttatcggaccgacgttcctgaaacaacggcctacggacaggcaatctttgaatctcttcgaacacatttcggaaataggttacctgaggcgattgtcgaaccgggcagatcaatggttgggaacgctggcattatcgagtccgaagtcgtacttgtttcaagaaaaagcgccaatgatgtcaagcgctgggtatatttggacatcgggaaattttcaggcctggccgaaacaatggatgaagcaattcaatacccgatccaggttatgggagatgacggagagggtgatagtgaagcggttgtgcttgctggccctacatgcgatagcgcggacgtgttatatgagcgtgctgaatacaaattgccgatggatctcaaggcgggcgatagagttcgcattcatgcgacgggtgcttataccactacatacagcgccgtgtgctttaacggcttcgcacctttacaacagatttgtatc

SEQ ID NO: 279 - DNA, 2634 bp, Delftia sp.
atgaagttccgttttccaatcgtgatcattgacgaggattaccgttccgaaaacacctctggattgggcatccgagccctggctcaagcgattgaagaagaaggcttcgaagtcttgggcgtgacctcttacggcgatttgagccagtttgcacagcaacagtctcgcgcaagcgccttcatcctgtcaattgatgacgaggagttctcccttggcgatggcggcaccgatccagtgatccactcactgcgttccttcatcggcgaagtgcgtcgtaagaacgcagacgtccctatctacatctacggtgaaaccaagacctctcgacacttgccaaatgacatcttgcgagagctgcacggcttcattcacatgtttgaggacaccccagagttcgtcgcaaaacacatcattcgtgaagccaagtcctacctggagggtgttcaaccacctttctttaaggcattgctggattacgccgaagacggctcctattcttggcactgccctggccattccggcggcgtggcattcttgaagtccccggtgggtcaaatgtaccaccagttttatggagaaaacatgctgcgtgctgatgtctgtaatgcggttgaggaattgggccagttgttggatcacaacggagcaatcggcgagtccgaacgcaacgcagccagaatcttcaacgccgatcattgctactttgtcaccaacggcacctctacctctaacaagatcgtttggcaccatgctgtggcaccaggcgatgtggtcgttgtggaccgtaactgtcacaaaagcatcctgcattcaatcattatgaccggcgcaattccggtgttcttgaagcccacccgaaatcactttggtatcattggcccaatcccccaatccgagttctctgtcgaaagcatccaggctaaaattgctgcgaaccccttgctgaagggcgttgatgcgaagaccgtgaaaccacgtgtcttgaccctgactcagtccacctacgatggcgtgctgtataacaccgaaaccatcaagagcatgcttgatggttacgtcgctaacttgcacttcgacgaggcgtggttgccccacgcagccttccatccattttacggctcttatcatgcaatgggcaagaagcgtgcacgtccgaaacactccgtcgtttacgcaacccaatctatccataagttgctcgcaggcatctcccaggcatcccacgtgctggtccaagattcccagaccgaaaagttggaccaccacttgttcaacgaggcctacttgatgcacacctctacctctccacagtattcgatcattgcttcctgcgatgttgctgcggcaatgatggaaccaccaggcggcaccgcactggtggaggaatccatcttggaagcattggatttccgtcgtgcaatgcgtaaagtggaggacgagttcggcgatgacgattggtggtttgaagtgtggggtcctgaaaagttggcagatgagggtgtcggctccgcccaggattggatcattcgcggccacgacgccgctccgaaaagatccaaggctaaaaacggcaaggagttcgacaattggcacggctttggcgagctggccgatggcttcaacatgcttgaccccatcaagtccaccattgtgaccccaggcttggatttggatggcgactttagcgataccggcatcccagcttcaattgtcactaaatacctggcggaacacggagtggtcgttgagaagaccggcttgtattccttctttatcatgttcaccatcggcattactaaaggtcgttggaacaccatgttgactgcactgcaacagttcaaggacgattacgatcgcaatcagcctcttgcccgtatcttgccggaattttgccaacagcaccgtcgatatgagcgtatgggccttcgagatttgtgtcaacacgtccatcagctgtacgctaagtatgacatcgcgcgattgaccactgaaatgtacttgtccgatctgcaaccggcaatgaaacccaccgacgcatacgcacacatcgcccagcgcaagaccgagagagttgaaatcgatcacttggaaggtcgtattaccgtgggattggtcaccccatacccacctggtatcccattgctgatcccaggcgaagtgttcaaccgcaaaatcgttgattacttgttgttcgcacgtgagttcgcgaaggaatgccctggcttcgaaaccgacatccacggcttggtggaattgcagtccgaggatggcgaagtccgatactatgcagattgcgtggctggcaccgctccagctcgtaaaaccccagcaggcggcaagccagctgcaaagaaagccgtgaagaccgccgctaaaccagcggcaaaggccgctgcgaaaaccgctggcaaggcagccgctaaaactgttgcgaaggcggcagccaaaccagctgctaagccagctggcaaggtggctaaagcagccgctgttaccggtgtgaaagcaccagccaagcgtcctgcggcacgaaaggctcagccagctgctcctgaagtgggcaccgctgcaaaaccagcgcgtggtcgaaagatggttcaagtgggcgacgatggtccattcggacgtaccatc

SEQ ID NO: 280 - DNA, 1404 bp, Alicyclobacillus sp.
atggatgaaacaccgattttgagacaactgcttggtgcagcgcaggcggagcgccttagtatgcatgttccgggccatcactcaggcagagatatgcctgctttattggggcaatggttacagtctgccttgcgtattgacttgaccgaactgccgggcctggataatcttcatgacgctactggctcaatccttgcctcgcaaaaactggctgcctcacactatggtagccaggggtgctattactctgtaaacggctccacggcatgtgttatggcagcgatttttgcatcagttgatgaacgtcatcgggacgttgtggttgctggcccgttccattggtctgtgtggcggggagcccaactggcacgtgcgaaactgtggcggttggcacctgtatgggatgaaaatagactggaaatgctggttccgccgccggaagctattgccaactggcttgctgaccaagcccagtcacatagctgggctgccattgtagttacaagcccgacctatactggacgagtcgcagatattgacgcgtatgcaaggttggcgcatgaatacaattgccctctgatcgtagatgaggcacatggcgcacatctcggcctggttacagatttaccgcctcattctgtgcaacagggtgctgacattgtcatccattccgcccacaaaacgcttccggcattaacacaaacggcgtgggttcatcaccagggctcactgctgtcggcagaaagactgaaatcagcgctgtcatttctgcaaacaacgtctccgtcctatcttttattggcttcacttgatgtggctcaagcctggttacgctgtgaagcagcgggcgatgtccttcagttacaacagcatctgtcaatgcttgaccgatggaggaacgtgagcgatgcagaccctcttagaatttggattccgaccggctcaacaaaacgggctcagctcctgaccgaagccttagaaaaggagaacatcttcgcagagtacgtaaacgttgcgggcggacttttaattccgccgtaccatctttctcaaagagatacagtaagactggaagcactgctggttcgttggcagctggaaagcggcgatcttgatccgaaactgcttgcgattttacaagcagttgcggaatgcacacctcagaagtgtctggatacggctgaccattttccgccgcaagaaacgtgcgtggtttggcagtctggtcactctgctgtgggtcggatttcagctgcctgtgtcatcccgtatccgcctggcatgccaattttattgccgggagatgaaatcagacgcgaacatgtggaactggttgcatatctggaagcatcaggagccatccctgtgggctgcaaaccgggatgtcagtttccggtccttagc

SEQ ID NO: 281 - DNA, 2271 bp, Pseudomonas putida
atgtcgtttggcggttcccacttgatgtacaaggatctgaaattcccaatccttattgtgcatcgtgccatcaaggctgactccgtggctggagaacgtgtccgaggtattgcagaagaattgcgtcaggatggtttcgccatcttggcagccgctgatcacgctgaagctcgactggtcgcggcaacccaccacggcttggcttgcatgctgatcgccgctgaaggtgttggagagaacacccacttgctgcagaatatggcggaattgattcgactggcccgcatgcgtgcaccagatttgccaatcttcgcattgggtgaacaggtcaccctggagaacgcgccggcagaagccatgtccgagcttaatcaactccgtggcatcttgtacctgtttgaagataccgtgcccttcttggctcgtcaggtggcacgagcggcacacacttatctggacggccttttgccaccattcttcaaggccttggtgcagcataccgctcaatctaactacagctggcacaccccaggccacggcggcggcgtggcctatcacaaatcccccgtgggtcaggctttccatcaattctttggcgaaaatacccttcgttctgatttgtccgtgtccgtgccagagctgggctccttgttggatcacaccggtcccttggctgaagcggaggcacgtgccgctcgaaacttcggtgccgatcacaccttctttgtgatcaacggcacctctaccgccaacaagattgtttggcatgctatggtgggtcgtgatgaccttgtgttggtggatcgaaactgccacaaatctgtggtccatgcgatcattatgaccggcgcaattccattgtacctgtgtcctgaacgtaatgagctgggcatcattggtccgatccccttgtcagagttctccccagaagcgatcgaggcaaagattcaggcaaaccctctggctcacggcagaggtcaacgtatcaagttggccgttgtgaccaactccacctacgatggattgtgctatcacgctggcatgatcaagcaggccttgggcgcttccgtggaagtcctgcacttcgacgaggcgtggtttgcatacgcggcattccacggcttcttcaccggccgttatgcaatgggcaccgcatgtgccgctgattccccgctggtgttctccacccactctactcataaacttctcgcggcattctcccaggcatccatgatccacgtgcaggacggcgcacgtcgtcagttggatcgtgaccgattcaacgaagcattcatgatgcatatctcgacctctccacagtactctattttggcatccttggatgtggcatccaccatgatggagggacaggcgggccactccttgctgcaagaaatgtttgacgaagcattgtccttccgtcgtgcattggctaacttgcgtgaacacatcgccgctgatgactggtggttttccatctggcagccaccatccaccgagggcatccagccattggcggcacaagattggcttctccagcctggtgcccaatggcacggattcggcgaagtcgctgatggctacgttttgctggacccgttgaaggtgaccctggtcatgccaggcctctcagcaggcggcgtgcttggcgagcgaggcatcccagccgctgtcgtttctaagtttctgtgggaacgtggcttggtggtggagaaaaccggcctgtactccttccttgtgttgttctctatgggcatcactaagggcaagtggtccacccttctcactgaattgctggagttcaagcgtcactatgatggtaacaccccgctttcctcttgcttgccatccgtgggcgtggctgatgcatcccgttaccgtggtatgggattgcgcgatctgtgcgaacagttgcacgactgttatagagccaacgctaccgcgaagcaacttaaacgcgtgttcaccagattgccagaagtcgcagtttcccctgcacgcgcctacgatcagatggtgcgtggcgaagtggaggcggtgccaattgaagcattgttgggccgtgtcgcggcagttatgctggtgccttacccacctggtatcccgttgattatgccaggcgaacgtttcaccgaggcaactcgaagcatccttgattacttggctttcgcacgtgcattcaaccagggcttcccaggttttgtcgccgatgttcacggtctgcaaaacgaaaatggccgttacaccgtggactgcatcatggaatgtgag

SEQ ID NO: 282 - DNA, 2253 bp, Marinobacterium sp.
atgaaatttcgtttcccggttgtgattatcgatgaagactttcgaagcgagaatatcagtggctcaggcattagagatctggccgaagcaattggcaaagaaggcatggaggtcgtaggctttacaagctatggcgatctgacatcatttgcacaacaggcgtcaagagctagctgctttatcctgagcattgatgacgaagaatttggttcaggctcagatgaagacgtctcaattgccttgaaggcaatcagagatttcatcacagaagtacgtaaacggaataacgacatcccgatttttctgtatggcgaaaccagaacatcaagacatatctcgaacgatattttgcgtgaactgcatggctttattcacatgttcgaagacacacctgaatttgttgcccggcatattatccgtgaagcacggaaatacctggattgccttgcaccgccgtttttccgggcgttaatggattatgctagtgactcaagctactcgtggcattgtccgggccactctggcggagtcgcttttctgaaatcccctgtaggccaaatgttccatcagtttttcggagaaaatatgctgcgcgccgatgtgtgcaacgcagttgatgaactgggccaactgcttgatcatacaggaccggtgtctgcgtccgaagctaatgcagcgcgtatctttaacgccgatcatctgtttttcgtcaccaatggcacatcaacatcgaacaaagttgtgtggcacagcacagtagcacctggagatattgtcgtagttgacagaaattgtcataagtcaatccttcacagcattatcatgaccggagccattccagtctttttaatgccgactcgaaaccattatggcattatcggaccgattcctaaatcagaatttgatccggagacgatcagaaagaaaattgaagcgaatccttttgccagaaaagcgaaaaataagaaaccacgcatcttaaccattactcaatcaacgtatgatggtatcttgtacaacgttgaaacgattaaatccatgcttggaaacacaatcgatacgttacattttgacgaagcgtggttgcctcatgctgcctttcacccattctatagaaatatgcacgcgattggcgaaggcagaccgagaagcgatgagacgctggtctttgctacccaatcaacacataaactgttggcgggcctctctcaagcatcacagattctggtacaggatggaacaaatcgaaaactggacacgcatcgctttaatgaaagttatctgatgcattcatcaacatcaccgcaatacgcgattatcgcttcatgcgatgttgcagcggctatgatggaaccgccgggcggcaaagcactggtggaagaatcactgcatgaagctctggattttagacgcgccatgcacaaggcagacgaagaatttggtaaagatgactggtggttcaaagtgtggggaccgcttccgcagtctgaagaaggcgttggcgatagagatgactgggttattcatgaagatgacacatggcacggctttggacgcatcgagtccggctttaatatgcttgatccgattaaatcaacaattatcacgccgggtcttaatctgaacggggaatttgatgaggacggaatcccggccgcaattgtcagcaagtatttggctgaacatggtatcatcatcgagaaaacagggctgtactcatttttcatcatgttcaccatcggtatcactaaagggcgttggaatagcatggttacggaactgcaacagtttaaagatgactacgatcataacttaccgatgtggagagttatgcctgaatttgcggctaaacacccgcaatacgagcgaatcggcttaagggatttgtgttctgcgatccattccgtttacaaggaatacaacgtggctcgcatcacaacggatatgtatcttagcaacattgaacctgccatgacaccagcggatgcttgggccaaaatggcacatagagatgtagaacgcgtttcaatcgacgaactggaaggaagagtcacagcaatgttagtaacaccatatccgccgggcattccgctcctggttcctggagaacgctttaatgccacgatcatttcataccttaaatttgcacgtgatttcaacagccggtttcctggtttcgaaacagacgttcatggcttagttcgtgaatctgtggatggcgaggaccggtattttgtggatgtggtcaaagac

SEQ ID NO: 283 - DNA, 1395 bp, Vibrio anguillarum
atgaacaacatctcattgccaatctacaacagcctcaataacgcgaacaaaaaactgaaaggctcatttcatgcactgccgatccaaaacctcggaaagacaaaggatgttgttgtttcagaagactttaacgcgcggctgtcaaaagtaaaggaactggaactgtcactgacatcaccgtttttcgatagtctgacggacccttcgaaagcgatcgatgaaagcgctaacatccttaaggatatgtatggcagcgacctgtcactgtttgtcacctgcggctcaacaatttcaaacaagatcatcatcgaagccatttgcaaatcatcagataaggttctttgtcaaagaggcgtgcatcagagtatctacttctcgctcaaggcacaaaattctgatgtaaactacgttcaggacttgatctgtaatgatgacgcctatatttactcagcagatacacaaggcatcattgacgcacttgttagagcggaagaaacaggaacgagctacacaacgctcatcatcaactctcaaacatacgatggagtgtgctttgatctgcaagaatttctgccggtagtttgtgaacgcgccaagggtattaaaaacatcgtcattgatgaagcatggggcgcatggtcaacgtttgacccgaaaatgaaggaaaaatcagctatccagaatgcatcaacactgagcaaaaaatacgatgtgaacttcattgtcacgcattcagtacacaaatcactgtttgcactgagacaagcgtccatcattaatgtttttggctcagaggattgccagacaaaagtggtcggctcacattttaggaaccactctacatcaccaagttatccgattcttgcatcaacagaactggctctttcccatgccaatcaatatgcagtgcagtactctaaccgtatctccgagcaatgcgaatacctgaaatcatttatcaacgatctgtcactgtttagatatttatcactgacactggaagaagaatacttaatccaagatccgaccaaattgtggattacttgtaccactaaactgcttagcggtgcgaagatcagagaaatccttttcaacaagtacggcatctacgtcagccgctactctcacaactccatcctcttgaatctgcatcatggcatttcaaatgaactgattggcctgctggcaaacgcgttatgcgaaatcgataagaagtacaagacgaagaacaaccttttaaatatcaacgttggagacattgctaattcattctacatcttgtacccgcctggtatccctattctgacaccgggccaaacgatttgtaacaacgtcatcacaaagatcaaccagagcatcttcgatgacacgtctttgctcattgtagaaggcaac

SEQ ID NO: 284 - DNA, 1395 bp, Vibrio anguillarum
atgaacaacatctcattgccaatctataacagcctcaataacgcgaataagaaactgaaaggctcatttcatgcactgccgattcaaaatctgggaaaaacaaaggatgttgtggtctccgaagactttaacgcgcggctgtcaaaagtaaaggaactggaactgtcactgacatcaccgtttttcgatagtctgacggacccttcgaaagcgatcgatgaaagcgctaacatccttaaggatatgtatggcagcgatctgtcactgtttgtcacctgcggctcaacaatttcaaacaaaatcatcatcgaagccatttgcaaatcatcagataaggttctttgtcaaagaggcgtgcatcagagtatctatttctcgctcaaggcacaaaattctgatgtaaactacgttcaggacttgatctgtaatgatgacgcctatatctattcagcagatacacaaggcatcattgacgcacttgttagagcggaagagacaggaacgagctacacaacgctcatcattaattctcaaacatacgatggagtgtgctttgatctgcaggaatttctgccggtagtttgtgaacgcgccaagggtattaaaaacatcgtcattgatgaagcatggggcgcatggtcaacgtttgacccgaaaatgaaggaaaaatcagctatccagaatgcatcaacactgtcaaagaaatacgatgtgaacttcattgtcacgcattcagtacacaaatcactgtttgcactgagacaagcgtccatcattaatgtttttggctcagaggattgccagacaaaagtggtcggctcacattttaggaaccactctacctccccaagttatccgattcttgcatcaacagaactggctctttcccatgccaatcaatatgcagtgcagtactctaaccgtatctccgagcaatgcgaatatctgaaatcttttattaacgatttgtcattgtttagatatttgtcactgacactggaagaagaatacttaatccaagatccgaccaaattgtggattacttgtaccactaaactgcttagcggtgcgaagatcagagaaatcctgtttaacaaatacggcatctacgtcagccgctattctcacaattccattttattgaacctgcatcatggcatttcaaatgaactgattggactcctggcaaacgcgttatgcgaaatcgataagaaatacaagacgaaaaataaccttttaaatatcaacgttggagacattgctaattcattctacatcttgtacccgcctggtatccctattctgacaccgggccaaacgatttgtaacaacgtcatcacaaaaattaaccagagcatctttgatgacacgtctttgctcattgtagaaggcaac

SEQ ID NO: 285 - DNA, 1425 bp, Dethiosulfatibacter aminovorans
atgaagttgggagaagaattgaagaagtaccgcgaagcaggcaccgccagattccacatgccaggccataaaggcatctcctcttgcttggaagaggtctttgttctgggaaacgatgttaccgaagtggatggccttgacaacttgcacaagcccaccggcgttatcaaagatttgctggaagacatttccggcgtgtacggctcctataagaccttgatctccactaacggctctacctcttccttgcagtccgcaatcctgggtgtgaccaagccaggcgattccattctggtggatcgtaactgccacaagtccgtgtacaatgccatgatcttgggcgatctgaacccagtgtatttgatgcctaagtgtgatgaagagagcggtctgtcatggatcgaggaccttgctggcttggaagagtccatccgtgcggatgaaaagattaaagcagtggtcttgacctaccctacttatttcggcatctgctgtgacatggaaaagattgcggagaccgtgcaccgctacgatcgtatcttgattgtggatgaagcacacggctcccacttgcgtttttgcgattctcttccatgtagcgcattggatgctggtgcggacatcgttgtgcagtctacccataagactttgccatccttgacccagtcctccttgctccacatcagagatgaaaaacatgtcgaaggcgtgtccgacatgatctccatgttgctgacctcttctccgtcctacttgatgatggcttccatcgaggcgtctgttgatcttatggaccgtgaaggctcctcccgtttgaaggcaaacatggattgcgtggataaaatggccgatcgttacgagaatgctggtcgaatcttccgtaagcgagattacttcatcaaacgtggcgtgcacgacttcgatgacactcgattgttgttcaagacctctgaaatcggcgtcgatggcggtcgcgctgaatccattctgagaaaagagtacaacgtgcaggtcgaaatggcggacactaactatgtgaatgcattcatgaccgcctgtgatggcgcttacgacatcgagcgactgtttgcagccgtgaatgatatggtccttaagtatggcatgactgccgatgacgaaaagaccggctccgaagacgaagcatccatgccgtgcactatggaatgtcccgagatggcgatgaacatgcgtaaggcattctacagcgaaaagacctctgtggacatcattgacgccgtgggcgaaatctgcggttgtcacattaccccatacccacctggcatcccgttgctgtgccccggcgagaagattaccggtcaattggtcgaacgtatcattaagatctccaaatctggtattgaagttatgggcttggaagaaggcaagatcaagatcattaagatt

SEQ ID NO: 286 - DNA, 1389 bp, Prochlorococcus marinus
atgtcaatttcatcatttctgacaaagaaattcctgaaatcactgtttttcccagcacataaccgtggagcagcactgccgaagaaactggttaaactgctgaaaaatcatccgggctattgggatttgcctgaactgccagagatcggatctccgctttctcaatccggtttaattgcaaaatcacagcgtgaattttcagacaaattcggtgcaaaggggtgctttttcggcgtcaacggagcgagcggtttaatccaaagtgcagttatttcaatggcaaatccgggcgaaaatatcctgatgccgcggaacgtccatatctcagtaattaaaatctgtgctatgcagaacatcaaccctattttctttgatctggaattttcaaccgttactggacactataaaccgatcacgaagatctggttggataacgtttttaagaaactgaacttcgacgaaaacaaaatcgctggcgttattcttgtgaatccttcttatcatggctacgccggcgatctggaaccacttattgactgctgtcatcagaaaaatctgccggtcttggtagatgaagcacatggctcatattttctgttttgcgagaatctgaacttgccaaaaccggctctttcttccaacgccgacttggttgttaattcactccataaatcactgaatggcctgacacaaacggctgccctgtggtacaaagggaatcttatcaacgaaggcaatctgattaaatcaattaacttattgcagacaacgagcccgtcatcactgctgctttcaagctgtgaagagtctattagagattggctgaataagaaatcactgtcgaagtaccagaaaagaattttagaagctaagatcatctacaagaaactgatccagaaaaatatccctctcatcgagacccaagatccgctgaaaatcgtgcttaatacatcaaaggcaggaattgatggttttacggcggacaaatttttctatcgcaacggcttaattgccgaattgccggagatgatgaccctcactttttgcctgggcttcggaaaccaaaaggattttctgaatctgttcgaaaaactgtggaagaaactgttgctgaatagcaagaaatcaaaatcactggaagttttaaaatccccgtttaaattcattcaggctcctgaaattgagatcgggattgcctggcgatctgaaacaaaatccattcctttttctgaatcactgaacaaagtttcaggcgatattatttgcccgtatccgccgggcattccgctgcttgtacctggcgagaaaattgatcttgaccgctttaattggatcaacaaccaatcactgtgtaacaaagacttggttaacttcaacattaaagtgtta

SEQ ID NO: 287 - DNA, 2292 bp, Candidatus Burkholderia crenata
atgaagttccgctttccagtggtcgttatcgacgaagatttcagatccgagaacatctcgggttccggcatccgtgcattggctgaggcgatcgaacgagagggcgttgaagtgttcggtttgacctcttacggcgatttgacctctttcgcacagcaatcctctcgtgcctcttgctttatcttgagcattgatgacgatgaattgctgccgtatgttgacaacgtggtcgttgcagaaggcgataccccagagcgcgcatccgccatcgtggcattgcgtgccttcgtgcaggctgtccgcaagagaaacgcggacatcccaatttttctttacggcgagacccgcacctctcgacacttgccaaatgacatccttcgtgaattgcacggcttcatccacatgtttgaagataccccagagttcgtggctcgccacatcattagagaggcgaaggtctacttggacgctctggcgccacctttctttaaagaactggtccagtacgcagaagagggctcttatagctggcactgcccaggtcattccggcggtgttgccttcttgaagaaccctctgggacagatgtttcaccaattctttggcgagaacatgcttcgtgctgacgtctgtaatgcggttgatgaattgggccaattgttggatcacaccggtccgatcgcagcctccgaacgtaacgctgcgcgaattttctctgctgaccacttgttctttgtgaccaacggcacctctacctctaacaagatcgtttggcatgctaccgtggcgcccggcgacattgtcttggttgatcgtaactgccacaaatccatcctgcatgcaattaccatgactggcgccatcccggtcttcctgaccccaactcgtaaccactttggcatcattggtccgatcccccgtgatgagttcaagccggagaacatccgaaagaaaattgaagcaaatccctttgcccgagaggcactggccaaaaacccaaaggcaaaacctcgcatccttaccattactcagaacacctacgacggcgtgatctataacgtcgaaatgatcaaggatttgctgggcgatttgttggataccttgcacttcgacgaagcatggctgccacacgccgagttccatgacttttaccaagatatgcacgcaatcggagctggtcgtcctcgaaccggcgctttggtgttcgcgacccactccactcataagttgctggctggcatctcccaggcatcccaaattgtggtccaggactcggagaactccaccttcgataaacaccgtttcaacgaagcctacctgatgcatacctctacctctccacagtatgctatcattgcgagctgcgatgtggcagccgctatgatggaaccaccaggcggcaccgctttggtcgaagagtcaatcgctgaagcgctggacttccgtcgagcgatgcgtaaggtggatgatgaatacggcgatgagtggttctttaaagtttggggtcctgaggcacttgccgaagaaggcatcggcgaccgtgaagagtgggtcctgaagccaaacgattgttggcacggtttcggcccacttgcagaaggcttcaacatgttggacccaatcaaggccaccatcattaccccaggcttggatgttgatggagagttcggcgagaccggtatcccagcggcaattgttaccaagtacttggcagaacacggaatcattgtggagaaaaccggcctgtattccttcttcatcatgttcaccatcggtattactaagggccgctggaacagcatggtgaccgaactgcagcaattcaaagacgattacgacaacaatcagccactttggcgtgtcctccctgattttatcgcacaacacccatcctacgaacgcattggccttagagatttgtgcgaacagatccattcagtgtaccgcgcaaacaatattgccagacttaccactgaaatgtacttgtcttctatggaaccggccatgaagccctctgaagcatacgcaaaattggtccaccgtgagatcgaccgagttccgattgatgaactggagggccgtgtgacctctatccttctcaccccatacccacctggtatcccattgctgatcccaggcgaacgcttcaacaagaccatcgttgactatttgcgtttcgcacgtgagttcaacgagcgtttcccaggctttcacaccgattcccacggcttggtgggcgagatgatcaacggtcgtattgaatacttcgttgactgtgtggcgctggaacga

SEQ ID NO: 288 - DNA, 1647 bp, Leucobacter sp.
atgttgatcgctgattccgctcgtcgagatgctgcaccagctgctaccgacccacagaccactgtgcaagacgccaccgtccaggatgtcactgttcaagacgtgaccgcacaggatgctaccgttcaagacgtgaccgctcagggcgatgaacgtctgcgtcgtcacgcggtgaccccatacgcagatgcccttgaccgttatatcgctcgaaaccccacccaactgatggtgccaggccacggcggctccgaccttggactctccgcaagactttctgaatacttgggcgagcgtgccttgcagctggatgtgcctatgttgctggaaggtatcgatcttgaggctcactccgcattggatgaagcattggaattggcagccgatgcatggggcgcaaagcgtacctggttcttgactaacggcgcttcccaagcgaatcgaaccgctgctatcgcagcacgtggcttgggagaacacttgttggctcagcgttctgcgcactcctccttctccgatggtgtcttgctggccggaattaccccttcttatgtttttccggcagtggatgccgttaacggaatggcacacggcgtgtcccctgaagccttggatgctgcgttgaccctggctgaacaagagggccgtgcagccgctgcggtgtacatcatttctccgagctatttcggctccgtgtccgatgtccgtggcttggcagatgtggctcacgcacacggcgcaccattgatcgtggatggagcgtggggtccacacttcggttttcatccggaactgcccgagtcaccagcacgtttgggcgccgatctggtggtgtcctccacccacaagttggcaggctccttgacccagactgccatgcttcacttgggccacggcccattcgctgaccgtttggaagcattggtggaacgtgcatttggcatgaccgcatccacctctacctctgctatcatgcgagcatccttggacatcgctcgttccgctttggtcactggagaagcagcaatcggtcgttccgtggaaaccgcacaacacttgcgcgaggtcctgagagccgatccacgtttcgacattgtctccgatcatttcggcgagtttcctgacatcgttgatactgacgttttgcgtgtgccaattgatgtttcggcaaccggtctgtccggacactgggtgcgtaaccagttgatcaccgaccatgctctgtactttgaaatgtccaccgcgacctctatcgtggcagtcattggcgccggtaaaaccccagatgtcgctgcgattcaccgagctttggaggacgtggtgtcctccgcagccgctgatgctgaacgtgctgcaaccgcaggtgcagttgagttcccacctatgccagcacctggcgcccgtcgattgaccccacgtgatggcttctttggtgaaaccgagatcgttccagccgctgaagctattggacgcgtgtccgctgataccctggctgcatacccgcccggcatccctaatattatgccgggtgaagagatcaccgccgctgcggttgagttcctgcaggcagtgtccggctcccctaccggatatgtccgtggcgctttagatccacacgtttccacctttcgcgtcattagagttggc

SEQ ID NO: 289 - DNA, 468 bp, Pantoea ananas
atgaatattcttgctatcatgggcgcacatggcgtgttttataaagatgaaccgcttagagaactggacgtggcactgtcacaacagggtttccaacttattcgcccgaaaaataccgatgacctgcttaaactgatcgaacataacccgagaatttctggcgtcatctttgattgggacgagcacaattcccctgaattatgcggagaaattaatcaattgaacgaatatctgccattgtacgcgtttattaacacgcattcacagatggatattagcatcaacgaaatgcgtctcccgctgcatttctttgagtatgcactcaacgcagcggatgacattgcgttgcatatccggcagtatacagatgactacctggatcacattacaccgccgctgactaaagcactgtttacgtatgttaaagaaggcaaatacacattctgtacgcctggtcacatggccggg

SEQ ID NO: 290 - DNA, 1413 bp, Phormidium willei
atgttgcagtccaaaaccccattcttggatgcactgaaggccgaagctaactcctctcacaccccattctactttccaggccataaacgtggacaaggcatcgccaacccattgaagaactggttgggcttggaaatgttccagggcgatcttcctgaattgccgcaattggacaacctgtttcagccccaaggcccaatcaaagcagcccagcaactggctgcggcagccttcggtgctaagcagacctggtttttgactaatggctccaccgctggtgttattgctgcgatcctggcgacctgcaacccaggcgataaggtgttgctggcgcgtaactcccaccagtgtgcgattgcaggtcttatcctcgcagccgctgaacccgtgttcatccagcctgattacgacccgcaatgggacatggtgttgcgtgtcaccccagaagcattggaaaccgctttgaaacagaactccgatattaaggcagtgttggtggtgtcccctacctaccacggcatctgctccgacgttgccagactggcggcatgctgtcaccgtcacggcatcccacttatcgtcgatgaagcacacggcgcacacttgggcttccaccctcagtttccagcatccgcattgcagggagaggcagacttggttgtgcagtccacccacaagtccttgaccgcgctctcccagggagcaatgttgcattaccaaggcgatcgcatttctccagaccgtatccaggccgctttgcccctggttcagtctacctctccaaactcccttattctcgcatccttggatatggctcgacagcaaatcgcgaccgaaggctatcagcaactgcaggactgtgtggagatggcacagcaacttcgctctcacttgagccaactgccatccgtcgcattgtccccacacgccgatgacccgtcccgtttgactctgcgaatcggtcagctcaccggatacgaagccgatgagcaactgaccgaacacttcggtgtcatcggagagcttccacagctccaccacttgacttttgctcttaccctcggtgaccgtccacctgatggcgatcgacttctcaacgctattcgtcacctggcacagtccgctccaatcccttccccattgtcctcccaagatctttcccctattccgcccgctatcatgacccctcgtcaggcgcacttcgcaccgaagaaaaaggttttctttcataagacctctggcgaaatttgcggcgagctgatctgtccatatccacctggcatccccattttgatcccaggtgaacgaattaccgagactgccctgatccaccttaaggaaaccctggcggcaggcggtgtgcttactggctgccaggatacctctggcgagttcttgtccgtggttgaccgt

SEQ ID NO: 291 - DNA, 1527 bp, Richelia intracellularis
atgaacttgcacccaatcattatcccgatgcccctgacctgcaattcggatttctcccagacctctaccccattgttggataccttgtgggactccgctaacaagccacacaccgcgttttacaccccaggccataaactgggacagggcatctccccacgtcttgcaacctatttcggcaaggatgtgtttcgtgcagatttgccagagttgaccgccctggataaccttttctccccaaccggcgtgatccaggcagcacaagaattggctgcgcaggtcttcggtgcaagccaaacctggtttctggtgaacggctccacctgcggagtcgaggcagccatcttggccagctgtggctccggcgataagattatcctgccacgaaacgtgcactcctctgtcatttccggcctgatcctttctggtgctattcctatcttcgttaacccggaatacgatcccgtgttggacattgcgcactccatcaccccacagggcgtggcagcagcattggaattgcatccagagaccaaagccgttatgatggtgtaccctacctactatggcgtttgcggcgatgtggccgctattgccaacctggctcacgagtataatatcccgttgttggtggatgaagcacacggcgcacacttcgcctttcatcagcaactccccaccactgctttggcggctggtgcggatcttaccgtccagtccacccacaaagttttgggtgcaatgacccaggcatccatgctgcacattcaaggcaagagaatcgatcgtgaccgagttcataagtccttgcagttgctgcagtctacctctccttcgtacttgttgttggcttctttggacgccgctcgacagcaaatggcgatctgcggcgaagaattgatgtcccgcaccctgcagcttgctgcacgtgcacgttcccgtatctcccaaatcccaggcttgtccgtgttggaagtgccaatctcctactatccatccttcgtcgcgctggatggcacccgtcttaccgtgaccgtgtccgaattgggattgaccggctttgccgctgaagagatcctggacgaacagcttggcgtcacctgtgagttcgcatccttgaagaacttgacctttattatctccctgggtaatactaaagaggatattgactacttggttcaggcattctccatcttggcccaggaatattgccaaccggtcgagcagcaaaacatgtctcacccctgtgtttacccaattcctgaaggcatctccaactccattctgatgcttccacgtgaagcattcttcgcgcacaccgaggcattgtctatcacctctgaacgaatctgcgatcgcatttgtgccgagatcgtttgcccctacccaccaggcatcccaatcctgatgccaggcgaagtgatctcccagtcagcgctcgcatatttgcagcaaattaagcaaatgggcggtttcatcaacggctgtaccgacactaattttgaaaccatcaaggtcatcaagatc

SEQ ID NO: 292 - DNA, 2892 bp, Tetrasphaera japonica
atgtccgaattttccgctcaggcatacaacgcatggtggcaggctcgcttggacgcttggtctcaggtcgaagaagaggcagatcgtcgcgtgcgctccgttgatcccgagcgcgcggaagcaatgaccgcggcaattgaaaaggaccttgagctgctgtctcacatcgagcgctattgggcgtaccctggtaaagacggttttctgcgtatccaagaactgtttcgtaccggtggcccagtggaatttgcacgtgcagttgctcaggtcaaacgcggtgtgtccgctgattattcttatggtgcgaccgagacccgttcctcctctgatctggcatctgacggcgtggaatctctggaaccaaacggcaccggtcgtcaacgctattttgaagtcttggtggtcgaacgaatgaccgttgagcaggaacgagcgctgcgcgaggatctgcgacgttggcgtcgtcccgacgatgagttcatctatgatattgttgttgtcggttctggcgaggaagcttttgtcgcaatgtggttgaacccgaccatccaggcatgtgtgattcgtaagcgattcggccacgcatcctctcacgatttgtctctgctttcccaattcctggacccaggtgtgcgagaccgactggaccgtcacaccccgcgtgagcgtattgacattctggcagacgaactttccgagattcgtccagaggtcgatctgtacctgatgaccgaggtcgctgtcgaagaagtggcaggttctttgtctccacacttccgtcgagtgttccacgcacgtgagggccttctggaattgcacctttccatcttggatggcgttgcccaccgttaccgtacccctttctttgatgcactgcgttcttatgcgcaccgtcccaccggctctttccacgcattgccaatcggccaaggtaaatctgtggtcacctctcactggattaacgacatggttgacttttatggtttgaacatctttctggcagagacctctgcaaccggtggtggtctggactctttgttggaaccgaccggtccgttgcgtgatgcccaacagttggcgtctgaggcgttcggttccacccgctcctatttcgtgaccaacggcacctccaccgcaaacaagatcgtcggtcaagcgaacgttggtcccaacgacatcgtcctggtcgatcgcaactgccaccagtctcaccactacggtcttatgctggcgggcgcgcgagtctcctacctggatgcgtatccgcttaacgaatatgccatgtatggcgccgtgccgttgaccgagatcaaaggcaagctgctggacttgaagcgtgcaggcaagttggatcgagtcaaaatggtcatgctgaccaactgcacctttgatggtattctgtatgacgtgcaacgtgtcatggaggagtgtttggcaatcaagccggacttggtgtttctgtgggacgaggcgtggttcgcatttggtcgttttcacccagtctatcgaacccgcaccgcaatgtactctgccgagcgtttggtccaccgtttgcgttctccggagctgcgtgaacgctttgaggagcaagcagcagcgcttggcgatgatccagatgacgagacccttctgaccacccgtctggtgcccgacccagaccgcgcgcgtgtgcgtgtttatgcgacccagtctacccacaagaccttgacctctcttcgtcaaggttccatgatccacgtctttgaccaagatttttctggcaaggttgcagaggcatttcacgaggcgtacatggctcacacctctacctcccccaactatcaaatccttgcatctttggacattggccgccgtcaagcggctttggagggttatgagctggtgcagaaacagcttgaatttgcgatgcgactgcgagatgcgatcgataaccacccactgctgcgtaagtatatgcgctgcctgtccaccgcggacctgattccggaagcatatcgaccatccggcatttcccaaccccttcgttccggtctgcgtaacatgattaacgcgtgggaccacgatgagttcgtgttggacccctcccgcatcaccctttccatcgcggcaaccggtatcgacggcgcaacctttaaatctgagcagcttatggaccgattcggtattcagatcaacaaaacctctcgtaacaccgttctgtttatgaccaacatcggcacctctcgttcctccgtggcatatttgattgaggcactggtgtccatcgcacgtgacttggagcgtaagtttgacgagatgtctccctgggaatttgatgctcaccgacgcgcagtggcgcgacttaccgccgcgtccgcacccttgccaaacttcggtggctttcacgaggcgttccgtgaaccctccgatccaccaaccccggagggcgacatgcgtaaagcctttttcggcacctatgcagacggtgcgtgcgagtatgttcttcaagcgaacgtggaggagcgtgtgcgcgcaggcgaaaaactggtctccgcaacctttgtcaccccgtaccctcctggttttcctgtcctggtgccaggtcaagtcattaccgaagacgtgttggagttcatggcgcgacttgataccccagaggtgcacggttatcaggcagaagtgggttaccgtatctaccgaggttccgcgcttcctgcgcccaaagttccctcttccccgaacggcacctccacctccgcgtctgtgtctgttgacggcttgccgatggacggcgcgggtgacggctcctctccggagccagccgcggttgcatccgctgcctcttctcgtcgccgctcctctcgctctcgtgctggtgctgtggctggcgctaaatctgctcccgatggtgcg

SEQ ID NO: 293 - DNA, 1431 bp, Pontibacillus halophilus
atgattgagcatcaaagaacaccgctgtatgaaactctcgtcaaacatcgctggaagggcgctacatcttaccatgttccgggccacaaaaatggaaacgtattttatgaacggggcaaaacactgtttcaggatattctgtcgatcgaccttactgaaatttcaggcctggatgacttgcatgaaccgggcggagttatccaagaagctcaggaactggcatcaacacattttggctcaagagcaagttattttctggttggcggctcaacagctggtaacttagcgtccgtattggcagcgagtgaacgagaaggcccgatcctcatccaaagaaattcacataagtcaatctataacggcctggaactgagcggggcatctacagttctgattgcaccgagatattcagttagaacgggcctctaccatgatctgcacgttgaagacgtgattgaagctgttgagcaatttcaggatgctagcgccatcgtgctgacatatcctgactattacggaaacacgtacgatcttaaatctatcatcgactacgctcatcaattcgatattccggtcatcgtagacgaagcacatggcgttcatcttcatcttgatccgagattaccgtcatcagctattgaattgggagccgatattgttgtgcattcagctcacaaaatggcaccggcgatgacaatgggcgcctttcttcatcactgctcatcaagagttgatattaaccgcattcaacattacttgcaactcattcaatcatcatcaccgtcttatcctatcatggcgagcctggatctttctcgtgcttatctggcctcactggacgaaaaagagattggaagaatcctggaacgcatcgaaacggagcggaaactgatggcaagccctcatcactacgaagttattccacatcacgcgacagatgacccgtttaaaacaacgctgcgcgtgcaagaaggttataatgggcaggagattgcaagacgccttgaaggcgttggcctgtttcctgaattagtgcaagatagccatatcctgcttgttcatggcctggattactctgaactgaacacaattgaaaaacgctgggagaaggcgcataattccctgaaatcaatgcagggaaaccacgcaaccattgaaactgaagttatgaattatccggcgatcacgcgtatgccatatccgtaccaacagttaaaacattgggtcacaaaagaagttacggcagaagaagcagtcggccaactttcggcttgctcagtaattccatatccgccgggcattccgttaatcgccaaaggcgaaattatcacggagggacagattaatgaacttcgtcggttacaacagagcaacttacatatccaaagctctgagtgtaatttgcagaagggcttattgatctatgaacgt

SEQ ID NO: 294 - DNA, 1404 bp, Prochlorococcus sp.
atgttctactctatgggcttgctgaacttgttgagcgcaaaccgcaatgaaaacctgtttcttccggctcacggtagaggaaatgcgctgcccaagaacatcaaaaccttgctgcgtttgcgaccgggcatttgggatctgcccgaacttttcgagattggcggtccattgatctccgaaggtgctattgcggagtcacagaagtcctctgcatacgaggtgggcgtggatcgttgctggtatggcgttaatggtgccactggacttctccagtcctccttgctggcattggcccgtccgggtcaagctgtgctgatgccccgaaacatccacaaatcctgcattcaagcgtgtctgttcggcggcttgaccccattgttgttcgatgtgccttacctgactgaccgtggccatgcttccgttttggaacgcaagtggctccagagagtgttgaagaaagcgaaagagttcgaagaagacatcgcagccgtggtcctggtcaacccgacctaccaaggttattgcgccgacatcgaatccttgatcaaggagattcactctcatagcctccccgtgttggtcgatgaagctcacggtgcgtatttgatctcccagattcgtccagatctgcctaagtccgcactttctttcggcgccgatttggttgtgcactcgctgcataaatccgcatcctccttggtgcagtctgccgtcttgtggagccaaggcgataaggtggacccattcaagatcgaacgtgcaattgagttgctgcagacctcttctccatcctccttgctcttggcctcctgcgaatcctctatcaaggaactgattgagccaaatggcatcaagaaattgcgttcccgtattgatgaagctgaggtcctgaaggacttccttatcaacaaagaagttccactgcttgagaacaatgatccattgaagatcattttgcacacctctaaattcggcctgtcgggtatcgaagtggataagtcctttatgaagaaacgcatcattggagaactggcggagccaggcacccttactttctgtctcggcttgtcctcccataagagactgggtaaacgttttgttcgaatctggaaccagattttgtcctcctactgcaagcaaaaaccatgtttctttaagcgtccaccattctccatcgtgtcaaagccgtataaaccctgctcagattcgtggggctccgactttgaaaaggtcaacttgaaagattccatcggccgtatttctgtcgagatggtttgtccatacccgcccggtatcccactcttgatcccaggcgaaatccttgatgaggcacgtgtggactggttgatcgaacagaagtccttctggcctgagcaaatctccgactttgttcgagtgatttcc

SEQ ID NO: 295 - DNA, 3093 bp, Eimeria brunetti
atgaatggtcggcagcatttattttacgtgttggtcctggtccctccttgtacatacttgaaaaaagatcatagactgaacttggcatctgaattaagacggatttcttccacagaaacgttgaatccgtcccctaatccggatgaaggacttgaatatcggatcgtcgaagtagacagcatcagaaaagcactgttggcggtgatcattaacccggaaatcctggcagtttgcattcaggataatgtcccgatggaaagcaacgcaggtcctccgctgagcccgctttcccggttgagcggctttgttcggggattagcgagatttgtcgaaggaccgctgtccaaaatccggttaggtgcaccgccgttacctacgctgattgaaggcctgaatagctcccgtcggggacttgatatttattgcgtatgtacaaacatgggattgacaacagcaggacctgtagaccatcttgtgcggcgtgcgtttgtaccgacagaagatcattccgacctgcatgaagcattaatcgaaggcgttcgcgcgaaagcgagatgtccgtttttcggagcactgagagcttatgcgcagcgtccgattggagtttttcatgcgttagcagtctcaagaggaaatagcttacggcggtccaaatgggcacatcggttactggacttttatggagccgcactgtttaaagccgaaagctccgcaacgtgcggtggcttagactcacttttagatccgcatggtagcttacttgaagcacaacgtttggctgcccgtgcatttgatgcgagctacgcgtttttcgtaacgaacggtacatcaacaagcaacaaaatcgtgttacaagccctgacaagacctaatgatgtggttttgattgatcgggactgccataaatcacatcattatggactggttttaagcggcgcccggccgtgttaccttgatgcgtatccgttacatgcgtatagcatgtacggtggtgtaacactgaaaacgttaaaacgggcattattaggttttcgcgcagaaggtcggctgcaagaagttcaggtcctggttcttacgaactgcacgtttgacggtatcgtttacaatgtgaaacggattatggaagaatgtctggccatcaaacctgacattgtttttctgtttgatgaagcatggtttgcttacgcaggctttcatcctattttaaaaacacggacagctatgcattgcgcaaatgaattacgcaaagaactgatggaaagaaaatatcatcatctgcatgcggccctgttagacagactgcaagttagctccttagacgcagctccggcttctgccttactgggtctgagattgtaccctgacccgttaaaagcaagagtgcgtgtttatgcaacgcagagcacgcataaaagcctgacgagcctgagacaaggtagcatggttctggtcaacgatgacaaatttgaatcacatgttcatacggcatttaaagaatcttattatagccatatgtcaacgtctccgaactaccaaatcctggcaacactggacgtgggtcggtcccaaatggaattagaaggatatggtttagttgaacggcaaatcgaagcggcatttctgattcggaatgcgctgggctcagacccgtttgtcaataaatattttcggattctgggacctcatgacatggttccggctagcttacggcaatcctcattgcagcaaagctccggcaataaaacagaaaatggtagaatgaatgttcagagcttagaagaagcatggttaagcgacgatgaatttgttcttgaccctacacggattacactttatacaggccagtctggtcttgacggtgatacgtttaaagaattagaaatgagacggctgctttcctcaagacgggaactggaagaacttcagaaacagattgactggattgtcaaagattgcccggcacttcctgactttagcggctttcatcctgtgtttgcaatcttgcctcagcagcagcaacaacagcaacagcatcagcttcaacaactgcagcagcagttacaacagcagcaacaactggttcagcaattacaaaaacagctgcagcaacagcggttgggaaaccggaacgccgcggctggagcagccacgggtgaagcgacaacaggtgcagctgctggtggagcagcagcggcggcggcgcctgcagcagcagctgcagctgaaacggaagacgaaggagaaaaagaagaagaagacgatgtgtccccggtatctacaccgacgtcaattgatggttcagtgaaaaaggaaaatatgaataaaggaccgagcctgaaccttggtcttaatctgaacccgtaccttaaccttaataaacaacagctgttgccgttacctaactgtacatcatcaagcagcagctcaagctcatcctctagctcaagctctagctctagctcaagcgaagatgactattttaaagaatcagttcgcgatggtgacgtccgtgaacctttttacctgagctacgatgaagaaaatgtcgaatactactctctgcaacaggcattagaccttatccagaaaggaaaaatcttagttggttccacatttattattccttatccgcctggatttccgattagcgttcctggacaaatcatttccgctgcaatcgtggaatttatgatcaaaattgatgttaaagaaattcatggctttgatccgaaacttggtctgcggtgttttaaagaatctttaattaacagcctgatgcaatcaagaggcatcaaactgcaacagcaacagcaacagcaacaacaacaacagcagcaacaaccgcaacaacctcagcattacgacatctctggcgaagcggaagaacaagaaaacaacaatagctctagcccgacaacgacagcgtctttattgcggttaccggacccgaatcaacgcttacagcaagaactgcaacaagaactgcagcaggaacttcaacaagaattgcagcaagaacttcagcaggaacttcaacaagaacttcaggaacttcaacaagaacttcagcggcaacaacagcaacagcaactg

SEQ ID NO: 296 - DNA, 1128 bp, Acidiphilium sp.
atgacccctaagttggctcgtttcttggatagcggcatggtgtccaccccagcgatcttggttgatctggaccgtgtggcagccaactttgctgcgctgcgagcagcccttcctgatgctgctatctactatgcagtcaaagccaatcccgcagccccagtccttgatcgtttggtgggcttgggctcccgtttcgacgctgcgagcatcgaagagattcgtgcatgcttggcagctggagctgctccagcagcaatctccttcggcaacaccgtcaagaaacgcgctgcgattgccgaggctcacgcacgtggcgtggatttgttcgcatttgattccgacgaagaattggacaagttggcagccgctgcgcccggtgccaaagtgtactgtcgtctggcagtctcccaggatggagctgactggccattgtcccgtaagttcggcacctctggcacccacgcacgtgatttgttggtgcgtgcagccgaacgaggtctgatcccttggggcgtgtccttccatgtcggctcccagcaaaccggtgttggagcatggcgtactgccatcggtcaggctgcggcagtgttcaccgatttgcgtgcacgtggcattgacctgcgacttctcaacttgggcggcggcttcccaacccgttaccgagatgacatcccacctttgggcgatttcggcgccgctattatggacgctgttcgacaagcgtttggtaacaatgtgcctgatttgctgatcgaaccgggccgcgctattgtgggtgacgcaggcgtggcggtgtccgaagtggtcctggcttgcaccagacacgaagatgagggtcgtcgatgggtctacttggatttgggccgtttcggcggtttggctgaaaccgagggcgaagcgatccgttaccgtattactgcaccaggcgtcgcaggtgctgatgcaccagctgttctggccggcccatcctgcgatggtgtggatgttatgtaccgcgagaccccatgtcctctcccggcatctttggcggcaggcgatcgtgtgttgatccacgacaccggcgcatacgtcacctcttacgcatctcaaggcttcaacggcttcttgccaccagaagaacactatttg

SEQ ID NO: 297 - DNA, 2259 bp, Rhizobium etli
atggaatttcaaatggcgttcccgattgctgttatcgatgaggactttgatggaaaaagcgcagcggggcgaggcatgagggacttagcagatgcgattgaaaaagaaggctttagaatcgtcagtggcgttagctatgaagatgccagacgcttagtccatatttttaacacagagagttgctggctggtttcagtagacggagcagaagataaaacaacgcgatggcaactgcttggagaggtactggctgccaagcgtcagcggaacgacagactgccaatttttcttttcggcgatgacaccactgcggaagatgtcccggcagcggtattacgacatgctaatgcatttttcagactgtttgaggatacagctgagtttatggcacgggcgattgctcaagctgcccgaaactatctggataggctgccgccgccgatgtttaaagcccttatggattatacactggaaggagcatacagttggcatacaccgggacatggcggcggcgttgcgtttagaaaatccccagtagggcaactgttttatacatttttcggcgaaaacacacttcgcagcgacatttcagtttcagtgggctcaatcggcagcttattggatcatgttggcccgattgccgaaggcgagagaaacgcagcgcgcatctttggaacagatgaaacactgtttgttgttggcggcacatcaacagcaaacaaaattgtctggcacggcatggtaggaagaggtgacttggttctctgcgatcgcaactgtcataaatcaattctccacagcctgatcatgaccggtgcgactcctatctatctgatcccgtcaagaaatgggttgggcattatcggcccgatttcaaaagatcagtttacacctgaatcgattgctcataagatcgctgcctctcctttcgcagcgcagacatccggaaaagttagactgatggttattacaaattcaacgtatgacggcctttgctacaacgtggatgcaattaaagcatcactgggagacgcggtcgaggtattgcattttgatgaagcatggtacgcctacgcaaacttccatgaattttacgatggatttcatggcatttcatcaaatcaaccggctagatcacagaacgccatcacctttgcaactcatagcacacacaaactgctggctgccctttctcaagcctccatgattcatgtccagcacgcagaaacgaagagactggatattacccgctttaacgaagcgtttatgatgcatacatcaacaagccctcaatatggaattatcgcctcatgtgatgttgcagcggctatgatggaacaaccggcaggccgttctttagtgcaggagacgattgatgaagcgatctcctttcgtcgggctatgaatcgggttaagaaacaagcggaaggatcttggtggtttgatgtttgggagcctacagtggccgaacagacgccatcagacacccatgcagattgggtgttaaaacctggcgacgcgtggcatggctttacaggcttggctgaaaaccacgttatggttgatccgattaaagttacaatcttatcaccgggattgtctgcgtccggtgctatggatgagcatggcattccggccgcagtgatcaccaagttcctgtcatcaagaagaatcgaaatcgagaaaacaggcctttattcatttctggttctgttttcaatgggcattacgagaggtaaatggagcacgctcgtaaccgaactgatcaattttaaggacctgtatgatgcgaacgctccgcttacaagagcccttcctgcattagcggctgcccatcctcaagcctacgcaggagttggtttgagagatctgtgcgagaaaattcacgcgatctatcgtaaagatgacgtcccgaaggctcagcgggagatgtacacagtattgccagaaatggcactgagaccggcggacgcttatgatcgtctggttaaatctcggattgaatccgtggagatcgatgaactgatgaatcgcattcttgcggttatgatcgtgccgtatccgccgggcattccgcttatcatgccgggagaacgtatcactcaatcaacaaaatcaatccaggactatcttctctacgcacgtgactttgatcggaagtttccgggattcgaaacagatattcatggattacgcttcgcgcctggtgacggaggtagacgctatctggtggattgtattgctggcgaagaacaagaa

SEQ ID NO: 298 - DNA, 2343 bp, Mesotoga infera
atggagttgttcaaggattttcctgtgttggtggtggatgacgatttgcgttctgaaaacaccggcggtcgtgctacccgtgaaatcgttaaggaactgcagaagcgtggcttctccgtgatcgagtcgtactccggatatgactgcagaatcgagttcatgtctcacagcaacgtgtcctgtgtcttgctggactgggatttggtcatcaagccggatgcggaatttttgggtccaggcgagatcattgaaatcattcgtggccgtaacatgttgatcccaattttcctgatgaccgagaagttgcgtgtcaaagagatccctttggaaattgtttcccaaatcgacggctatgtgtggaagctggaagattcaccatccttcatcgcaggtcgcatcgaagaggccaccgagagatacatggacgaacttttgccaccattcttgaaggaattgatccgctacgtggatgagttcaagtattcctggcacaccccaggccattccggcggcgaagcattcttgaagtcctccaccggcaagatttttcataaattctttggcgagaacatcttccgttccgatttgtccgtgtccgtgccagaattgggctctttgctggagcacaccgaagccattggtgaatctgaaaagtccgcagccaaaatcttcggctccgatgaaacctattttgtcactaacggcacctctacctctaacaagattgtcttccattactgcgttaccccaggcgacatcgttctgattgatcgtaactgtcacaaatcgatcatgcattccatcattatgaccggtgctatcccgatctacttgaccccatcccgtaactcccttggaatcattggcccaatccacgaagagaacttcgagtggtcggaaattgagaaggcgatcaaagaatccccattggtggaagataaggaaaactaccgtattaaactggctgtcatcaccaactccacctacgatggcctttgctataacgcgcgtaccatcttggatcgactggagaaggttgtggacttcgtgttgtttgatgaagcatggtacgcatacgcaaaattccacccgatgtacctgggtcgatttggaatgtcctccgacatcgatcgtgaacgatcccccgtcgtgttctccacccactctactcataagttgctcgctgcattctcccagggctccatgatccacgtcaaggacggacgcaaaagagtggatcacggccgtttcaacgaagcatacatgatgcacatgtctacctctccacagtatgcaatcattgcctccttggacgttgcagccaagatgatggctggcaacgcgggtcgttttctgattgatgagaccatccaagaagcgatcattttccgaaagaaaatgaagcacttgaagaaagaaatcgagtccaaggagaccgaccgtaaacgtcgatggtggctggaaatttggcagccggataaggtgtccatcgaaaccgagtcgggcgagcgcaagactttcgatttggaagacattgatgaatccatcttgaaggacagacccgattgctggtatttgaaagcaaatgaagactggcatggcttcggcaagttggacaacgattacgctttgttagatccagtgaaagtcaccgttatgaccccaggcatcaccaagcaaggacgtatgaaaaactggggcattccagcaaccatcgtgaccaccttcttgcgtgatcgaggtattgtggtcgaaaagtctggacactactccttcttgatcttgttctcccttggtctcaccaagggcaagtccggcacccttctcgccgagctgttcacctttaagaaacttttcgacgaagatgctgcgttggacgatgtgttcccagacatcgtccgaaagtttcctaagaaatacggcaaaatgacccttcaggaattgtgccgccaaatgcacgaatacctgcgcaaggtgcgtatcaccaaggttctcaaagatgtgtatagcttgaatccagagcaggtcatgctgcctgctaaggcgtactccgaacttgtgaacggcaataccgaattggtgcgtatccgtgaacttcaaaaccgtatctccgctgtcatggttgtgccgtacccgcccggtatcccagttattatgcctggcgagcgttacaccggtgacactaagcgaatcattgaatatttgaacctgtctgaagagttcgataacaagttccccggctttgaaaacgagatgcacggtttgaagatgaaaatcgactccgccaacaagaagcgttactatacctactgtctgaaggagttcgagcaggaagataacgaa

SEQ ID NO: 299 - DNA, 1203 bp, Phascolarctobacterium succinatutens
atgagcaacaagaaacacttccagatctcccagcaagcagtggaaaagctggccgtccgttttggcaccccattgctggtgttgtccttggaagagattaagaaaaactacaaggtgctgaagaaatatatgccacgcgtcaagatccactacgcaattaaagccaacccacaccctgaaatcttgcgtgtgatggctgatatgggctcctgcttcgatgtggcgtctgacggcgagatccgtaccatgcacgatatgggcgtggatggcggccgtttgatctacgcaaaccccgtgaagaccggcgtgggcttggaagcatgccgttcttgtggcgttcgaaagatgaccttcgatagcgcttcagagatcgacaaaattaagaaacaatgtccagatgcgaccgtgcttctccgtctccgaatcgataactcctctgcacatgtggatttgaacaagaagtttggcgcagcccgtgaaaacgcactggcccttatgcagcaagctaaggaagcaggcttggatatggcaggcatcgccttccacgttggctcccagaccgtgtccgccgatccatacttgcacgctcttgacattgcgcgtgaactgtttgaagaggctgaggctgcgggcctcaagttgcgaatcttggatgtgggcggcggcttcccgattcccgaaccaaaggttaagttcaacttgccagagatgttgcgccagatcaacgcacgtttggatgaagacttcgctgacgcggaaatctgggcagagccgggtcgatatatttgcggcaccgccgtgaacttgatcacctctgtgatcggtgtcaccgaacgtggcggccagccttggtacttcctgaatgagggcctttatggcaccttctccggcgtgttgttcgatcaatgggacttcaagttgatctccttccgtgaaggtgaagagaaagtggcagccactttcgcaggcccatcttgcgattccttggacatcatgtttcgtggccgtttgaccgttcctttgcaagtgggcgatttgttgcttgtcccgtcttgtggagcctacacctctgcatccgccaccaccttcaacggcttctccaaggctaaattcgtcatctgggaacgcgttaaggcggaagttgagccagtggctgcggtcggcagagttgagatgaatcagtccgtcgctcaagcggttaag

SEQ ID NO: 300 - DNA, 1509 bp, Candidatus Atelocyanobacterium thalassa
atgaccccacctaagaaagtctactcccactatcagaacaccgcaccgttgatcgatattctgaacatccttaagaaacagcaagacgcagccttctacgcaccaggccacaagcgcggacaaggcatcaactcctccttgtcctccttgctgggcaagaaagttttccagtccgatttgccagaattgcctgagctgggtaacctttttattccagacgaagctatcgagaaggcgcagaacttggctgcggaagcattcggcgcccgtcgaacctggtttctgatcaacggctcctcctgcggcttggttgcagccattctggctgtgtgtaacccaggcgataagatcattgtccctagaaatattcaccattccatcaccactggcttgatcatgtctggtgcggttccaattttcctgtaccctaagtgcgacagcaaatggaacttgccattgaatattaccccatctatcttggaagctaccttggaaaagtaccacaacatcaaagcggtgttgatcattcacccaacctaccacggcatctgcggaaacatcagcgaaattgtgaagatcacccactcatataatatcccattgttggtggatgaagcacacggcgcacacttccaatttcatgagatccttccatcctccgcactctccgctggtgcggacctttccgtccagtctacccacaaggttctgtcagcaatgactcaggcatccatgcttcacattcagggcaacttgatcgatgagcatcgtatcaaccagaccttgcaattcatccagtcctcctccccatcctccttgctgcttgcatccctggatggtgcccgtcagcaaatcgtgattgacggacaaaagttgttgaacaagaccatcaagttgagcaagttgtcccgtaacaagatcaacgacatcgacggcttctccaccctgtcccttgttgaaaagaaaccagagttttacgatttggacatcacccgcctgactgtggacatctcctccttgggcgtgtccggttggcaggtggataagatccttagaaccaagttgaacgtcactgccgaactgcctatgttgtcctccttgaccttcatcatttccatcggcaacaccgaagaggatattactgctctggtgaaggcattcttgaaattgaagaaaatcatccactcctcctcctccggtatcgtcattccatcctcctcctgcaacttgaagtccttctcctccttgtccatctccccacgtgatgcattctttgcctctaagaaaattgtttttatcgaaaaatctattggtttgatctccggagagatgctgtgtccatacccaccaggcatcccaaccatcatgccaggcgaagtgatcacctctgaagcaattgagtatctgcttaagatcaaacagcaaggcggtatcattaccggctgctccaacaaagatttgaagaccatcaaggtcatctgctccaagtccaccaattacctggactcc

SEQ ID NO: 301 - DNA, 2262 bp, Thiomonas intermedia
atgcacttccgttttccaatcgtgatcattgatgaagacttcagaagcgagaactcctctggtcttggcatccgtgcattggctcaggcgattgaaaaggaaggcatggaagtgttgggcgtgacctcttacggcgatttgtcttccttcgcccagcaacagtcccgtgtgtctgctttcatcctgtctattgatgacgaagagtttgcaaccgccgaagagggtgtcgagcccaaggcacttcacaacttgcgtgccttcatcgaagagattcgtttccgtaatgcagaaatccccatctacttgtatggcgagacccgcacctctggacacatcccaaacgacattttgcgtgaactgcacggcttcatccacatgtttgaagataccccggagttcgtggcccgacacatcattcgcgaggctagatcgtacatggactccctggctccacctttctttcgcgcgcttgtcggttacgcagccgatggctcctatagctggcactgccctggccattctggcggtgtggcattcttgaagtccccggtcggtcaaatgtttcaccagttctttggcgaaaacttgctgcgtgctgatgtgtgtaattccgtggatgagctgggccagttgttggatcataccggtcctgttgctgcgtctgaacgcaacgcagccagaatcttccacgcggatcacttgttcttcgtgaccaacggcacctctacctctaacaagatggtctggcacagcaccgttgcaccgggcgatgtggtcgttgtggaccgtaactgccacaaatcaatcctgcatgcaatcattatgaccggtgcccttccagtgttcttgacccctactcgaaatcactacggtatcattggcccaatccccttggcagagttccatccggataacatcgctcgtaagattgccgagaacccattgacccgacacctggttggcaagatcaaaccacgcgtgctgaccattactcaatccacctacgatggtgttttgtataacgtggacaccatcaaacagatgcttgatggccacattgacaccctccatttcgatgaagcatggttgcctcacgcctgcttccatgacttttaccgtggcatgcacgccatcggtccggatcgtgaacgaaccaaggaagcaatggtgttcgcgacccagtccacccataaattgctggctggcctgagccaggcatcccagatccttgttcaaaacgcgcagaatcaacagctggacttccaccgttttaacgaggcataccttatgcactcttccacctctccacagtatgctatcattgcgtcgtgtgatgtggctgcggcaatgatggaaccaccaggcggcaccgcattggtcgaagagtccatcctggaggctatgaacttccgtcgagcgatgcgtaaggtcgatgcagactacggccaggattggtggtttaaagtttggggtccaaacggtttggcggaagagggcaccggtgaacgtgatgactggcttctccacgcaaccgatgactggcatggattcggcgctgtcgcggatggttttaacatgttggacccaatcaagtccaccattgttaccccaggcttgaacatcaatggcgatttcgacgccaccggcatcccagccgctattgtgactcgttttctggctgaacacggcgtgatcgttgagaaaaccggcttgtactccttctttattatgttcaccatcggaattactaagggccgttggaacacccttgttactgcattgcagcagttcaaagatgactacgatcgtaaccaaccgttgtggcgaatcctgcccgaatttgtcgctcagaacccacgttatgagcgaatcggccttcgtgatttgtgccaacagattcacgaagcgtaccgcgagcaagatgtcgcaagactgaccactgaaatgtatttgtccgatctgcagccagccatgacccctactgacgcatacgccaagatggctcaccgtgacatcgaacgagttgagattgaccagttggaaggccgtatcaccgcggcactggtgaccccatacccacctggtatcccgttgctgatcccaggcgagcgtttcaacgcgcccattatgcgttacttgaagttcgcacgcgattttaacttgcgtttcccaggttttgttaccgatgtgcacggcttggtgaccgaaactgacgcatccggcaacaaacgctatttcgtcgattgtgttagaaatccagac

SEQ ID NO: 302 - DNA, 2340 bp, Pseudogulbenkiania ferrooxidans
atgagaacagcggttctctcagctctgtatccgagcgtgcctgtcacatttcgctatgctgtttacgaagatactggaatgcgttttcatttcccgattgtgattatcgatgaagactttcggagcgagaatacgtcaggcagcggcattagagaattagcagcggctatggaaaaagaaggcatggaagttgtggggtatacatcttacggcgatcttacgtcctttgcccaacagcaatcaagagcagcaggctttattctctcgatcgatgacgaagaatttggttcaggcacacctgaagaagcactggatgcattagcgaatttgagaaactttgtggctgaaattagacgccgtaatccagacatcccgttatatttgtacggtgaaacccgcactgctcgtcatattcctaacgatattctcagagaactgcatggctttattcacatgcacgaagacacgccagaatttgtcgcgaggcatatcatcagagaagctaaatcttatcttgatacactcgcaccgccgtttttccgcgccctggtacattatgcacacgacggatcttattcttggcattgtccgggccacagcggcggagttgcgtttcttaaatctcctgtggggcaaatgttccatcagtttttcggcgaaaatatgttgagagcggatgtttgtaacgctgtggacgaactggggcaactgcttgaccacacaggcccggttgcggcttccgaacgcaatgccgcacgtatttttagcgcggatcatctgtttttcgtgaccaatggcacatcaacatcgaacaaaattgtttggcactccacagtggcggctggcgatattgtattggttgacagaaattgccataaaagtaatctgcacgcgattatgatgacaggagctatccctgtttttcttatgccaacgagaaaccattatggtattatcggaccgattccgaaatcagaatttcaactcgataacattaaaaagaaaattctggccaacccgttcgcaagagaagcactggagaaaaatccgggcgcaaaaccaagaattttaaccatcactcaatcaacgtatgatggaattttgtacaacgttgaagaaattaaatcaatgcttgatggtgaagtggacacattacattttgatgaagcatggttgccgcatgcatcctttcacgatttctatggagactttcacgcaattggcgaaggcagaccgagatgcaaggattctatgatttttagcacccaatcaacacataaactgttggcgggcatttcacaagcatcacaaatccttgtgcaagatccgcaaaatcgccagttagacacggcctggtttaacgaagcatatctgatgcatacatcaacgagcccgcagtacgccattatcgcaagctgcgatgtcgccgcagcgatgatggaacaaccgggcggacaggcgctggtcgaagaatcactggtagaagcccttgattttcgcagagcaatgcgtaaggtcgatgaagagtatggacatgactggtggttcaaagtatggggaccgaatgaattaagcgatgacggtatttgtgatccagcggactgggaactggaaccggatgaacggtggcatggctttgctggaatcgaagaaggctttaatctgcttgatccgattaaagccacaatcttaacaccgggcctggatgttgatggttcatttgaagagatgggcattcctgctgccatcgtaaccaagtatctgactgaacatggagtcgtagttgagaaaacaggtctttactcatttttcatcatgttcacaattggtatcacgaaagggcggtggaatacgcttatctcacttttacagcagtttaaagatgacttcgataaaaaccaaccgatgtggcgaattatgcctgaatttgtcgctaaatatccgcagtacgaacgggtaggattgcgagaactgtgccaacgcattcatcagctttatagcaaacacgatattgcccgtctcacaacggaaatctacctgtctgaaatggagccggccatgcgccctgctgatgcctttgcaaaaatggcacatagggaaattgagagagttccggtcgaagaactggaaggccgtgtaacctcagttttgctcactccgtatccgccgggcattccgctgcttattccgggcgaacggtttaatcgaacaattgttgattacctgcgttttgcacaagagtttaatggcgaactgccgggctttgaaacagacgttcatggcttagtagcaatggagaaaaatggcaagaaagtgtattgcgtcgattgtgtaaaacag

SEQ ID NO: 303 - DNA, 1404 bp, Synechococcus sp.
atggctttgctgccacttctccaccgtgatgtgggccgtccattgttcttgccagcacacggccgtggctccgcgttgccacctgcaatgcgtcgattgctgcagcgaccggctggtttgtgggatctgcccgaacttccagcgttgggcggcccattggaaaacgatggagctgtggcagattcccagcgtgcagccgctgatgcaatgggtgttaaccgttgctggtacggagtgaatggcgccaccggtcttctccaagcggcattgctgggcatctcccgtccaggcgaagcggttttgatgccacgcaatgcacaccgttccttgattcaggcctgtcttctcggccaattgaccccattgctgttcgatctgccttatcagccagatcgtggacatcctgcaccagctgatggcccttggttggagtctgtgttggccgctctgcctgcaaagcacccaccaatctccgcggcagttttggtgcatccaacctaccaaggctatggcttggacccagcaccattgattcgttccctgcagcaccaaggttggccggtcctggttgacgaagcacacggctcccattttgccgctgatgtggacccagagcttccaccttcggcattgcagggcggcgcagacttggtggtccactcgctgcagaaatccgctaccggcttggcgcaaactgcagtcctgtggcagcaaggtgaacgtgttgataccgacgcgttgcagcgttccttgggctggctccaaaccacctctccatcagcattgttgttggcttcatgcgaggcggcactgcaccattggcgttcctctgctggccgtcgtcagcttcgtcaacgactcatgcaggcgcgcacccttagagatcaattgcgtcgagacggtttgcctctgcttaccactgatgacccgctgcgtcttgtgctccacccaggccgtgcaggcatctctggtttggatgcggatgactggctcttgccacgtggcctggtcgccgaacttcctgagccggctaccctgactttttgtttgggcctggcagaccagcgtggtttgcgtcgttccttgcgtcgagcatggcaacaactgcttaacgcacacccagcacgtgcaccacagccaccattgttgccaccaccattgccattggtggcacaacccgaagtcccattggccgaggcttggcgtgcaccacgtcgtttgtgcgttctggaacaggccgagggcaccatcgccgctgatctgctttgtccgtacccaccaggcatcccactcttggtgccgggtgaacgtttggatggcgcacgtctgcactggctgcttgagcagcgacaattgtggggcgaccagatccctgcaagacttgctgtgctctccgaaattgcc

SEQ ID NO: 304 - DNA, 2415 bp, Actinobacteria bacterium
atggtcaacggcaccgtgatgctggcactgcgtgaaaaccctctgggcggcggcgtgtctgcggaacaacttcgtcgtattggcaaagagttggagcgccacggcttggaacttcgttgggctgcggacgcgcgtgacgcacgagcaacccttcagaccgaggtcggtattgcggcggcagtggttgcgtgggatctgccagcgggccgtgcccgtggcggcggctctcgtggtcctgaggcggatgatggttccggtgaagcagctgcgcgcgcaggtgaagcaggcgacgaccgtacccctgcagtgggtgcagatgtgctggcacacatccgtcgtcgttttaaggatctgcccgtgttcctggtcatgaccgatgactctgagcacgacttggatcgtcttccactgtgggtttctgaggcagttgtcggttatatctggcctctggaagataccccagccttcattgcgggccgcgtggctaccgcagcccgaacctatcacaaagaaattttgccacccttcttccgagcattgcgtcgctttgacgacgcgcacgagtattcctggcacaccccagctcactctggcggtgtcgcctttctgaagtccccagctggtcgagccttctttgattactatggcgaacgtctgtttcgatccgacttgtccatctctgtgggtgaattgggctccctgtttgagcacaacggtcctattggcgaagcagagcgaaacgcggcacgagttttcggtgcagagcgaacctactttgtgctgcacggcgattctaccgctgaccgtatggtcggccactattccgtgaccgccgatgaaattgccctggtggaccgaaactgtcacaaatccgtgctgcacggtcttgtgatttctggtgctcgtccagtgtacctggttcccacccgaaacggttacggtctggcaggtccactgcctccggcagaaatcgcgccctctggtgtcgcggcacgtatcgcagccaacccattgacccccggtgcggtttctgccgatccgcagtacgcagtggttaccaactccacctatgacggtctgtgttacgataccgtcgccgcagcacgcgcattggcgccttctacccctcgactgcacttcgacgaagcatggtttgcatacgcgcgatttcacccactgtacgcaggccgatacggtatggctgtcggtccggatacctttgaaggcccagatcgaccaaccgtcttcgcaacccaatccacccacaagctgctggcagcgctttctcagtgtgcaatggtccacgtccgtccagcgcctcgcgcccccgtcgagcacgaacgtttcaacgaagccttcatgatgcacggcaccacctctcccttgtatccagcgattgcatcccttgatgttgcaaccgcgatgatggacggcacccaaggtcaatggttgatcgacgaggcagttaccgaagcaatccgttttcgtcaagccgtggtgcgtaccggtcgccgtattgccgcggcaggtgaccgcccagattggttcttcggcgcctggcagccagacaccgtcaccgatccagcgaccggcgcgaccatgccatttgcggaagcaccaaccgctctgcttgcgcgtgatcctggttgttggcagctggcaccaggtgcaccgtggcacggttttcgtgatctggcagatggtcactgccttcttgatcccgtcaaggtgacccttacctgcccaggcgtgaccgcgaccggtgcaacccaagaatggggtattccggcacgtgtgcttaccgcatatctggcgacccgtggcattgtggttgagaaaaccgattcctattctaccttggtgctgttttctatgggcattaccaagggcaaatggggcacccttatggatgccctgatggactttaagaacttgtacgactctgatgcgccccttgatggtgtcctgcccgaactggtcgagcaattccctcgtcgttatgcacgaacctctttgcgtgccctttgcttgcagatgcacgagcacctgacccgtgcggactttatttcctctttggacaccgcgttccaacagctgcctctgccagtgcaccctcctcagcactgttatcgtcaactgattcgcggtggcaccgaacgtctgcgcttggcagatgctgccggtcgagtcgctgcggctatggtgaccgtcaccccgcccggtattcccgtgctgatgccgggtgaatccaccggcgccaccgatggcccgctgctgcgttatctgcgagccttggaggcattcgatcgtgcgttccccggttttcactccgaagcccacggcgtcaccgtggattctgaaaccggtgactatctgattgagtgcttgcgtcgccccgaggaacctgctggtcgc

SEQ ID NO: 305 - DNA, 1422 bp, Sporosarcina ureae
atgaaatatcaagatcgtccattggtgcaagcactgcaaaattttcatgacagatcaccggtttcatttcatgttccgggccacaaaggcggcgcactgagcgatctgcctgttgcagtgcgtcaagcacttgcgtatgaccttaccgaactgactggtttggatgatctgcatgaagcaacgggggcgatcaaagaagctgaggataaactggcctgcctttatggctcagaacaatcatttttcctggtcaatggctcaacagtaggaaacttagcaatgttgtacgcgacagttcaaccgggagatcttgtcatggtacagagaaacgcgcataagtctatcttcaacgcgctggaacttacaggtgctaatccagtttttctgagcccggattgggacgaacaaacacagacggctggcacagtttcactgaaaacggtgaaagaagcactggcccaatatccagatgttaaagcagcggtgtttacaacgccgacgtattacggaattatcaacagagatctgagacagattatcgaggtttgtcacagctactctattccgatcttagtggatgaagcacatggcgcacattttatcgtccatgacgcattccctaaatccgcgttagaattgggagctgatttagttgtgcagtctgcacataagaccttgccggctatgacaatggcatcatttctgcacatccgtagtaagttcgttaaggtggaacgcgtcgcccattatctgcaaatgctgcagtcaagctctccttcgtacttaatgatggcatcattggatgacgcacgatattacgcggaaacgtatgatgagaaggactacgaatcatttcaaatctaccgcaacaacctcatccagggcttgtgcaacattgcccgtgtagaagtcgtacggacggatgaccaattaaaactgcttatccgcgctgccggtcatacaggatatgtcctgcaagaagcactggaacaacagggaatttatcctgaacttgcagatttataccaagtcttattggtactgccactcctgaaagctggtgacgaagagagctgcgttgatttagtggaccagtttaaagtcgcaatggattgtctggcagaaaaggaaacaacatcaatgcgtttcaacaacttcacatcaaattcatcaccgtcatcagttgtgtatacagcgaaccaacttcacacaatggatattgaatgggtcagcatgcagtctgctattggaaaagtagcagcggctgccattatcccgtatccgcctggcattcctcttttatgcgcgggagagcggatcaatcaagaacacatggttcagatttacgatctgctgatggcgggttgtcgatttcaaggggctatcaacagggagaaaaaacagattaaagtcgtatttgaa

SEQ ID NO: 306 - DNA, 1395 bp, Prochlorococcus marinus
atgtccatctcctccttcttgtccaagaagttcttgaagtccttgttcttcccggctcacaaccgcggtaaagcgcttcccaagggactcatcagattgctgaagaaacagccaggcttctgggatctgccagaacttcctgagatcggctccccactttccaactccggtctcattcatgacgcacagatctccatctccaagaaggttaatgccaagaaatgcttctttggcgtgaacggtgctagcggactgatccaatcaggtatcattgcaatggccaacccaggcgaatacattttgatgccccgtaacgtgcacatctctgtcattaaggcttgtgcgctgcagaacatcattcccatcttctttgatattgagttctcccgtgtgaccggtcattatatgccaatcaccaagcgatggttcactaacgtcttcaacaacatcgatttcgacaacttcaagatcgccggcgtcattttggtttccccatactatcaaggttacgctaccgatttggaacctttgatcaagatttgccacttgcacaaccttccggtgttggtggatgaagcccacggctcctatttcctgttttgtgagaacttcaacttgccaaagtccgcactgcgttcgaaagccgatcttgtggtccactccttgcataagtctttgaacggactgacccagactgctatcatttggcacaacggctacttggtcgaagagaacaagttgatcaagtccatcaacttgttgcaaaccacctctccaaactccttgctgttgtcctcctgcgaagagtctatcaaagattggctgaacaaggacaaccttaacaagtacaagaaacgcatcttggaagcgaagtccatctataacgagttgattaagaaaaagatcccactgattgaaacccaggacccattgaagatcattctgaatacctctaaagtgggcatcgatggcttcaccgcggaccgtttcttctacaagaacggtcttatcgcagaattgccagagatgatgaccttgactttttgcctgggcttctccaaccagaaggacttcacctttcttttccaaaagttgtggaagaagttgttgatccacaccaacaagtcctacggcttgaaagcgatcaagccacctttccgcattgtccagtcaccggaaatccccattggcgttgcatggaagtccaagtccatctccattccattggtggaatccttgggcaagatctccggcgacatcatctgcccgtacccaccaggcatcccactgattgtgcctggcgaacgtatcgataaagagcgaatcgactggattgaagctcagtccttgtacaacgaggatttgttgaactcctatatccgagtgctgaacaat

SEQ ID NO: 307 - DNA, 2235 bp, Pluralibacter gergoviae
atgaacatcattgctgtcatgagcgataaaggcgcatacttcaaggacgaagccttgtcagagctgcaccagcaactggaacatgagggttttcgccttgcatacccgaccgacagacacgatttgctgaagttgattgagaacaatgcccgcttgtgcggcgtgatcttcgactgggatacctacaatatggaactgtgttctcagatctccgacctgaacgatagacttcccgtctatgcgttcgcaaacaataactccaccctggatgtgactatgaatgacttgcgcctgaacgtccgtttcttcgagtaccgcttgggttctgcggaagacatcgcagtcaaaattagacagtccaccgatgactatatcgactcgattttgccaccattgaacaaagcactgtacaagtatgttcaagaagagaagtacaccttctgcaccccaggccacatgggcggcaccgcattcaacttgagccctgtcggctccttgttctacgatttctttggcgagaacaccatgcgttcagacatctccatttctgttggtgaattgggctccttgttggatcacaccggtccacatcgtgaggccgaagagtacattgctcacaccttcaacgcggaacgatcctatatcgtgactaatggcacctctaccgctaacaaaattgtcggaatgtacgcgtcccctgccggcgctaccatcttgattgatcgtaactgtcacaagtccttgacccacttgatgatgatgtcaaatgtggtcccaatctacttccgtcctacccgaaacgcatacggcatcttgggcggcatcccaaagaaggagttcacccgtgaatccatcgaggcgcttgtgaagaaaaccccgaatgctacttggcccgtgcacgcggtcatcaccaactctacctacgatggcttgttctacaataccaactatatcaagaagaccttggatgtcaagtctatccacttcgacagcgcatgggttccatacaccaacttttcgcctatctatgatggccatgccggcatgtccggcgatcgtgtcgagggcaaggtcatctacgaaacccagtccacccacaagttgctggcagcattctcccaggcatccatgattcatgtgaagggtgcaatcaacgaagagaccttcaacgaagcattcatgatgcacacctctacctctccatactatggcatcgtcgcatccaccgaaatggctgcggcaatgatgcgtggcaaaactggcaagcgattgatcaacggctccattgagcgcgctatcaacttcagaaaggaaatccgtcgattgcgttcggaatccgagggctggttctttgatgtttggcagccggacaacatcgatgacgtggcttgctggccactgaacccacgtaacgcgtggcacggcttcaacaacatcgatgacgatcacatgttcttggacccaatcaaggttaccatcctgaccccaggcatgtccccagatggcacccttgaagagaaaggtattccagcgtccatcgtttctaagtacttggatgagaatggtatcattgtggaaaagaccggcccatataacatgttgttcttgttctccatcggcattgacaagaccaaagcaatgagccttctccgcgccttgactgatttcaaacgtatctttgaccgaaacgttttcgtgaagcacgtgcttccatccttgtacgaatccgcacccgagttttataaggaaatgcgtattcaggaactggcccaaggcatccacgatcttacccgtcagcataacttgccagacctgatgtaccgagctttcgaggtgctgccggaaatggtcatcaccccacacgatgcgtttcaagaagaggtccgtggtaacatcgaaatggttgacttgaacgatatggttggcaaggtgtccgccaacatgatcctgccttacccgcccggcgtcccagttattcttcctggtgaacgaatcaccaaggaatccatgccggttcttaacttcttgcagatgttgtgtgacatcggcgagcactacccaggctttgaaaccgacatccacggcgtgatccgtgacgaagagaccaaacgttaccgtgttgtggtcctgaagccaggcaccgaccaaccaggcgataaaccctccgacactgttaagaaagacccagaggtgaagaaagaacctatgaaggtgaaaaccaaggccgctggcaag

SEQ ID NO: 308 - DNA, 2136 bp, Francisella sp.
atgcgtaacatcctttttgtttactccaagaagttgccagtgcacaagttggagttcctccagaacttggagtcaaacttgatcaaggaaaactacgattgcttgctgaccactgacctgaacaccgcagccgaaatcgtgaagtccaacaatcgagtcgcctccatcattttggattgggaccacttcgaattgtccgcatttgagaagttggccgattacaacccaaacttgccaatcttcgccattggcgataaccacttggacatcgagcttaacttggtggacttcgaattgaacttggatttcttgcaatacgacgctgtccttctcaatgatgacatcgagaagatcattaacggcattgatgcatactataaagccatcatgccaccttttaccaagcagctgatgcactacatcaacgaatctaattatagcttctgcaccccaggtcaccagcaaggccacggcttccagaagtccccggtcggagctgcgttttacgatttctttggcccaaacgttttcaagagcgacatctctatctctatggaagagatgggctccttgttggatcactccggcccacataaggaagctgaggattacgtcgcggacattttcaacgcagaccgctccctgatcgtgaccaacggcacctctacctctaacaagattgtcggaatgtactcggcgggtcagggcgataccatcttggttgaccgcaactgccacaagtccttgactcacttgatgatgatggtggatgtcaatccgatctacctgaagcccaccagaaacgcatacggcatcattggcggtattccattgtccgagttcacctctgcgtcaatcgaaaagaaactgtctgatcacccagtcgcagagagctggcctagatactgtgttattaccaactctacctacgatggtatcttctataacgtgaacaaggtccaccaggaactggatgtggtcaacttgcactttgactccgcgtgggtgccatacaccaacttccactccatctacgagggcaaatacggcatgtctattaagcctaaattgaaccacaccatctttgaaacccagtccacccataagttgctcgcagcattctcccaggcatctatggtgcacgtgaagggccattacgataacgaaaaactgaatgagacctttatgatgcacacctctacctctccgttctatcccatcgtcgcgtcctgcgaggtttctgctgcgatgatgaagggcaagttgggccagtctttgatcaacgattgtatcaactacgcattggacttccgcaaggaaatcgtgaagttgaaagaagagtccttggattggtactatgacatctggcaaccagaaaacattgatgagcagcaagcatggcctatcgacacctcttcttcctggcacggcttcaacgaagtggaggatgactacctttacttggacccagtcaaagttaccgtgatcttgcccggcattgacaaggaacacaacctggagaagaaaggtatcccggcttccattgttgcgcagttcttggaggatcacggcatcattgtggaaaagaccggcccatacactatgttgttcttgttctccatcggcattacccgtgcaaagtccatgaaattgctggctactctgaacaagttcaagcagatgtacgatcaaaaccgactggttaaagacgtgcttccaaccatctactccaagcaccctgatttctatgagaacatcaagattcaggacttgtgcgaaaaacaacacggtctggttgtgaagcataaccttccacaggttatgttccacgcctttgataagctgccggaatacaccatgtccccctaccaggcttatcaaaagctgaacaaaggcgacgtcgttaaagtgtgtcttgatgatttgttgggtcacacctctgccgtcatggttttgccttacccgcccggcatcccactgattatgcctggtgaacgaatcaccttggaatccaaagtcaccttggattatttgctgatgctgaaggacattggcgctgaactgccgggtttcgagtacgacatccacggcttggaaaagggcgatgacggcaagttgtatatcaaagtgatcatt

SEQ ID NO: 309 - DNA, 1428 bp, Carnobacterium inhibens
atggatcgtaagaaagtggactccgaacagcaccgtcgtccattgttcgacggcctgaaccaacataagaaaaaggagaaggtctctttccacgtgccaggccataaaaacggcatgaattgggatgaaacctggtcctctttccagtctgcattgtccttcgaccaaaccgaagtgactggcttggattacctgcacgacccagagggcatcctgaaggaatcccaggagttgctgtctaaattctatggctccaagaagtcctactatctgatcaacggttccaccgtcggaaacttggctatgattatgggcgcgaccaacaagggcgatcaggtctttgttgaccgtggttgccaccaatccgttatccatgcattggaactggccgagttgcagccggtgttcctgaccccagattgggcagaaatggaccaagccccgttgggcgtcaacatcaagaacttgaaggaagcgttcgagcactaccccgctgttaaggcgttgattgtgacctacccaacctacgatggtatggtttaccctatcgaagaattgattgaatatgcgcgcgagagaaagtgtcttgtgttggtggatgaagcacacggtccgcacttgaccctgggcgatccatttccatcctccgcattggatttgggtgctgacgcggtggtccagtcagcacacaagatgcttccatccttgacccagactgcctacttgcacatcggaaaccagtcctccgatgctttgaagaacaagatcgagcactacttgcacattttccagtcctcctccccatcgtatcctcttatggtgtccttggaatacgctcgctatttcctggcggattttaccaaaaaggacttgatcgccactctgaagtacagagacttgtggaaaaagcagttcaaaaaggctggcctgaccatctttcaatccgatgacccacttaaagttaaggtgtccttgatcaaccagtcaggagaagaattggccggccagttggaagaacagggcgtgttcggcgagaagaccgatggcacctctgtgcttctcacctttccgttgctgaaaaaggaaaccaagatcactgagttgttctctatccacattacccagtccgtgaagaacgaagtccccaaaaagatgaaaaccccacttctcatcgctcctttcgttgaattggatctgtcttacgagcgccagacctcttctaccaacaagcagatctccttggcagaagccgagggcaaaatcgcagcccgtaacattaccccgtacccacctggcatcccccttgtcctcaaaggtgaacgaattaaggttgagcagatcaaacaaattaaccactatttggatcagaacatgcgagtcaccggcctggaaaaccaaaaggaagtggtgttcttttccgaaaatgac

SEQ ID NO: 310 - DNA, 1326 bp, Carboxydothermus pertinax
atggctgaactgatcaacaaactgaagatccatcttaacaagaagccggtttcatttcacatgccgggtcacaaaaatggcagatttctgccgaagaaagttaagaacctgcttggcgaaaagtacttctctgctgatgtcacagaactgccgggcctggataatctttttacaccggaaggagttttattgaatctggaagccaaaattgcacgatattttggcttcccgagagcacatctgtcagttaatggctcaacagcagcggttctggcgcttatgctgtcatttttcaaaccgggagaaaaggttgtggtcgatagaatgtctcatatttccctgtatcatggcatggtacttggcgatctgctgccagaatttatctatccggactgggatgacgagtacggcttacctgttaacaagaacccaaacacaaacgccaaagcatattttctgacgaaccctgattatcatggcctggttagagatctgtctgaactgaaaacagctaagatttttctggatgctgcacatggcggcctgatcccgctttggcgcaaggatttctttcagaacatcgacggtttcgccgtgtccttacataaaacaggcccgttcccaaaccctctggcagctgtagtttactgggatgaaaaggttgaagttaagcgtgcattgaatctcgtgcaaacaacgtcaccaagctacccgcttatggctgccgcagaaggcggcgttgatatgcttttacaatctggcagacgcgccatgcagaaagcagtagaagttgcgcaactgtttaaagaatcactgaaaaaacgcggcatcggctttctgcaggctaaatatagcgccgaaccgttaaaagtgacattgaaggcacaagatcttggcatgtcaggagaaaagatcgcgaacgtactcatgaagaaaggcatctttccggaagcgtatggaccgggctacgttctgtttatgttgtctccgggaaataccgaaaacgaggttaaaaaactgctcaaagtcattgattccttaaaaggtacaaagcagagaatcatgttgcctaaaaacccatttcaaggacagagcaaactgaaactgacaccgcgcgaagcgtattacgctaaagaaaagtgggtggaactgcaagatgcggctggcaaaattgctcgtgacggagtgacactgtatccgcctggtgccccggtcctttatccgggcgaagagattacgcgggaagcggtcgcttacatcaactaccatctcaaattgggcctgaccgtaactggtatcaaagatgggcgtattcgggttatccgc

SEQ ID NO: 311 - DNA, 1407 bp, Anaerobranca californiensis
atgaaaattaagaaactgcaaaatctgtacatctacaacaaaaacaataagaaaagatacatcaagttccacatgccgggaaactacggcggcaaaaatctgaataagaaatttcgcaagtacatgccgtttttcgagacaacggaagtgtatggcacggatgactaccataacccacaaggaattattaagaaagctgaaaaatcaacagccaaattgtttaattctaaccactgcatctatctggtcaacggctcaagctctggaattatcgcagcgattagctacctttttcgtgaaggagatcagatcctggtttcaagagattgtcataaatcagtcatctatggcctgattctttctggagctgagccggtattttctgaacactccggtgcctcaccgctggattatcaaggcattcaacaggcaattaagaaaattgaaagaattaaaggcattatcctgaccactccgaattattacggtattgggaacaaagatctgaaattgatcgtacagctttgcaacaaatacaaaattaaactgcttgttgatgaagcgcatggaagccatctgtattttacagacctgaaagtgtaccttgcaaacacgtgtaaagcggatctggttgttaattcaacccataaaaaccttactggtttaacccaaactggcgttattaatatcaacgcagaggacattaatttgtccgaactgcgtaaacacatttcactgacaacatcaacatcacctagctacatcctcttggcaagcatcgcgtattgcaccgagcaatacactcagatcggagagaaaattctgcagaaaacaattaagaaagggaactacatgaaggaactgctggataagtacaagatccggtacatcaaggaaaaggatctgaatagcaaccaatatttggacccgacaaagatcacgctgctgtttaaagataataagaaagctaaagaagtttttaaacagttaatcaaaaacggcatcatccctgaatttttggccgacaacaaaatcctgctgtttattaactacaaaatttcaaagcgagaactggtaaaaaccgctgccattctgaaaagattttcaacggaagaagaagatattctctactcccaggaaaactgtttcagaatccgcaacacaggtgttttgacaccgagagaagcattttactctcaaaaggagaaaattccgctgaagaaagcgaagggaaaagtcgtagttcagccaatcacaccgtatccgcctggcattcctatcctgtttccgggcgaagtggtcacagaggaaattatcaaataccttaaaaatagcaacttttcatcaattcatggcattgagaatgggatgatcgaagtagttaaggataagtttttcgatgacaaa

SEQ ID NO: 312 - DNA, 1431 bp, Gracilibacillus halophilus
atgatgaaaaagcaacaggtgacgcctttatttgatagattgcaagacttcgcccaacagcattatgatagctttcatgttccgggccacaaaaatggacgcatcgtcgcacataagggtcaagatttctttgaccagctgcttccgttagacgtgacagaattatctggtttggatgatctgcatgcagcgcaaggcgttattcaagatgcgcagcgccttgctgccgaatggtttggcgctacatcatcatattttctggtgaatggctcaacagtcgggaacctcgcaatgatcctggcgaccgtaactgaaggcgatcaagttttcatccagcgtaactgccataaatcattgattcatggcatcgaactggctaacgcccaaccgatttttctttcccctgattatgacgaagccgttgagcggtacaccgcaccgtcactggaaacaatccagttagcctttcaacagtatccggaagttaaagcactgattctgacatatccagactacttcggaagaacgtacgatattaagtcgatgatcaactatgcgcattcataccaagtcccggtattaatcgatgaagctcatggctgccactttagccttccattcgtaccgtccgatagtgctttagactgtggagccgatattgttgtgcagtccgcccataaaatgacacctgcacttacgatgggcgcgtttttacacatccaatcagaacaaatttcatcaagagatattgaagcatatctgcaaatgcttcaatcatcatcaccttcctacccaatcatggcatcactggatttagcccgccattatttggcaacatacagcaaacaacattggcaccagctgatggcgtttattcatgaaatcacaacgtgtttccaagattctccgcattggaaagttattgcacatggcgagaaagatgaccctttgaaactgacaattgccatcaattcaagactgtcagtttcaacagtagcacatgtttttgaacaagaaggcatcttcccagaaatgattgatgacaaccagttattgtttgtgttcggcctgacgccgcatgttgatgtggacaactttagcagaaaattggaatctatccatcaacagctgaacagctctatcaaacacgcgaagattgaagaaaaacgcatgccgcaactggtcagcaagatcgacaccctgcagctttcttatagggatatgaaaagacgcacaaagcgttggattcggtgggaagaagcaattcatcacatcgcagcggaagctattatcccatatccgcctggcatcccgtttattatcaaaggagaagagattacacgtgatcatgtagactggattcaacatatctttagctatcacgcggaagttcagcctgctcatcgggagaaaggactttatatttacatg

SEQ ID NO: 313 - DNA, 2139 bp, Escherichia coli
atgaacattatcgcaatcatgggaccgcatggcgtcttttataaggatgaaccaatcaaggaactggaatctgcgctggtcgctcaaggattccagattatctggccacaaaattccgtagatctgcttaagttcatcgaacataaccctcgcatttgcggcgttatcttcgattgggacgaatattcattggacctctgtagcgatattaatcaactgaacgaatatctgccgctttacgcctttattaacactcattctacaatggacgtttccgtgcaggatatgcgtatggcattatggtttttcgaatacgccttgggacaagcagaggatattgcgatccgtatgcggcagtatacggacgaatacctggataatattacgccgccttttaccaaagcactgtttacgtatgttaaagaacggaagtacacgttttgtacaccgggccacatgggcggcacagcttatcaaaaatcacctgtgggctgtttattttacgatttctttggcggaaatacattgaaggctgatgtttcaattagcgtgacggaattaggatcattattggatcatacaggcccgcatctggaagcagaagagtatattgcgagaacttttggggctgagcagagctacatcgttacgaatggcacatcaacatcaaacaaaattgtggggatgtatgcagcgccgagtggctcaacactcctgattgacagaaattgccataaatcactggcgcatctgctgatgatgaacgatgttgtgccggtttggctgaaacctacgagaaatgctcttggaattttaggcggaatcccgagacgcgaatttacacgcgattctatcgaagagaaagtggctgccacaacgcaagcccagtggcctgtccatgcagtaattacaaattcaacgtatgatggcttgctctacaacacggattggattaaacaaacactggatgtcccgagtatccactttgattcggcgtgggttccgtatacacatttccacccgatctaccagggcaaatctggaatgtccggtgaacgcgtcgccggaaaggtaatcttcgaaacacaatcaacacataagatgttggcagcgctcagtcaagcatcactgattcacatcaaaggcgaatatgatgaagaagcatttaacgaagcatttatgatgcataccactacatcaccgagctaccctatcgttgccagcgtggaaacagctgccgcaatgctgcgagggaatccgggcaaacgacttattaacagatcagttgaaagagcactgcattttcggaaagaagttcagcgacttagggaagagtccgacggatggtttttcgatatttggcaaccgccgcaagttgatgaagctgagtgctggccagtggcaccgggcgaacaatggcatggctttaacgatgccgacgcagatcacatgtttcttgatccggtcaaagtaactattttgacaccgggaatggatgaacagggtaatatgtctgaagaaggcattccggcggctcttgtggcgaaatttttagatgaacgcggaattgtcgtagagaagacaggtccttataatctgctgtttctgttttcaattggcatcgataaaaccaaggctatgggattattgcgcggtcttacagaatttaagcgtagctatgacctcaatttgcggatcaagaacatgctgccggatctttatgccgaagaccctgatttttaccgtaatatgcggattcaagatttagcacagggcattcataaattgatccgaaagcacgatctgccgggcctgatgctgagggcgtttgatactctgcctgaaatgatcatgacaccgcatcaagcatggcaacgtcagattaaaggtgaagtcgaaacaatcgccttagaacagttggtcggccgggtaagcgcaaatatgattcttccgtatccgccgggcgttccgctcctgatgccgggagaaatgttaactaaagagtcacgtacagtcctggactttcttttaatgctttgtagcgtagggcaacattatcctggcttcgaaacagatattcatggcgcgaaacaggacgaggatggtgtttacagagttcgcgtgcttaagatggctggc

SEQ ID NO: 314 - DNA, 2133 bp, Plesiomonas shigelloides
atgaacattgttgccatccttagcaatgtggacgcgtattttaaagaagctccgcttcaagaattagatattgaactgcagaaaagaggctttcatgttatttacccatctgacgcagcggatctgcttaaagtcattgaaaataaccctcgcatttgcggcgtaatctttgattgggacaaatatggactggacctttgtaaggatatttcagctatcaacgaaaatttaccgttgcatgcgtttgctaacaacaactcagtgttagacattaaattgggacatctgagactgaatctgtcatttttcgaatatcatctggatattgcggatgacatcgctcttaaaattggccagaaaagagacgaatacgtcgatagaattttaccgccgctgacaaaagccctgtttaagtacgtacatgatggaaagtacacattctgcacgcctggtcacatgggcggcacagcatatcttaaatctccagttggctcaatcttttatgacttctacggtgccaatacgttaaaagcagatatttcaatcagcgtggcggaattgggctcactgctggatcattcaggcccgcacaaagaagcagaagagtatatcgctcgtgtttttaacgccgatgcatcttacattgtgacaaacggcacatcaacagcgaataaaatcgttgggatgttctctgctccttctggctccacagtgcttattgatcggaattgtcataaatcactgacgcaccttatgatgatgtcgaacgtcacaccgatctattttcgtccgactcggaatgcctatggcattctaggcggcattccgcaatcagaatttaaaagagaaacgatcgaggcaaaaattaagacaacgcctaacgcccagtggccaatttatgcagttgtgacaaattcaacgtatgatggcctgctgtacaatacgggcttcatcaaggacacattagatacgaagttcatccatttcgattccgcgtgggttccgtatacaaacttccatcctatctaccaggggaagtacggcatgtcaggcggcggcattccgggcaaagtcgtatacgaaacacaatcaacacataaactgttagctgccttttcacaggctagcatgattcatatcaagggagatgttgataaggaaatcttcaacgaagcatttatgatgcatacatcaacatcaccgcattatggcatcgtagcatcaacagaaacagcagcggctatgatgaaaggaaatacaggcagagcactgattgatgcatcagttcagagggccgtgagatttcgcaaagaaattaaaaaactgcgggcagagtcggacacatggtttttcgatgtctggcaaccggacgaaattcaggatgcggagtgctggaacctgtctcctaatgacaaatggcatggatttaaggatattgacgctgatcacatgtatttagatcctatcaaagtaacaatcctcacaccgggcctggataaggatggcaacttggaagaaacaggcattccggccgcactggtttcaaagtttttagatgaacaaggaatcatcgtagagaagacaggtccgtataatatcctgtttctgttttcaattggcatcgataaacctaaggcgatgcagttgctcagaggcctgaccgactttaaacgcggctatgatctcaacctgaaagtgaagactatgttaccgtcactgcatgcggactcaccgcatttctacaaggatatgcgcattcaagaattagctcagggcatccataaattgacgattaagcacgatctgccgaaaattatgtttcatgcgttcgaagtcctgcctcaaatggtaattccgccgtatcaagcatttcaggaagttctgcagggtaatacagttgaagttccgctggaagatatggtgggcaagatcaacgcaaacatgatcctcccttatccgccgggcgttccgttgattatgcctggtgaaatggtcacagaagagtcaaaaccggttctggaatttctgaagatgctggttgaaattggacgtcattatccgggcttcgaaacggatattcatggctgtcatccgcatgatgacggccgttacatggtcagcgtacttaaacgg

SEQ ID NO: 315 - DNA, 1452 bp, Thermoactinomyces sp.
atggaaaatcaagagaaaacaccgatctatgaagctctgcttcatcacaaggataagaaaacagacagctaccatgttcctggtcacaaacaaggggccaattttcttgatcataaggacaatctttttcagagcattttgcaaatcgatcagacagaagttactggcctggatgacttgcatcacccgtctggtgtaattgctcgtgccgaatatcttgcagcggaagcatttggagcggaaaaaacattctacttagtgggcggaagcacggctggaaacattgcctctatccttacaatgtgcttacctggcgataaagtcatcctgcaacggagctgccatcagtctgtctttcatggctgtatgcttgcaggcgtttcaccaatttattggaaagatgcttaccattctgacacgggatttgaaagaccgctggatctggattggcttgtccagaaatgccggcatgaaatggtaaaactggttgttatgacatcccctagttattacggcatggttcaaccaatcagaaagatcgcagatatttgtcatcagtttgacgtcccgttattggtagatgaagcacatggcgcacattttggattccatccaaatctgccgaatagcgcattgtcacaaggcgcggatctcgtcgtacaatcaacacataagatgttgggctcaatgactatgtcaagcatgttacacgttggctcatcaagagttcggatcaatgatttggaaagacaactccgcattgtgcaatcatcatcaccttcgtatccgctgctggcatcactggatctggcccgaaaacaagttgcagtgaacggctaccatctttttggacgtcttctcacagagatcgatcagttcaagaaagatacgttcccttattgcaaatgggttcaagaacttagcttacatcacctgaaatgccaagatccgtgtaagatggtgatcgccagctctggtcaaatgacagggtttgagatgcaagcatttctggaagataagggaatctacacggaacttgcggatgacagacgcgtcctgttttgtttctcccttggccatccggagggctcactgatccggctgaagaaagttctgctggaactggattgctggcttgacagctgtgagaatcgtttatccgaacgggacagtattgttttgagactcccgtcaacaacggaatttgtgctgcctttccaagatattagaaaacatcagcacgttcgcctgtgcctggaagatgcgattgacggcattatcaccgaaccgatcgttccttatccgccgggcattccggtgctgcttccgggtgaaagactgacatgtgaatggatggagtatctgagaggcgcagacagggcgggctatagaattagaggcctgtaccaagatcagttgacgtcagaagtccgcgtaaacattgtttttgtg

SEQ ID NO: 316 - DNA, 1419 bp, Lysinibacillus odysseyi
atgaaaagcgaacgtccgctggttgaagcactgcaaaaatttgtggaaaaggagccgtattccctgcatgtccctggtcacaaaaatggcagactgtcaacattgccgaaggaaattaagaaagcactgatctatgatgtaacggaactgtcaggcctggatgacttccatcaccctgaagaagcaattgatacagcgcaaaaactgcttgctgaaacgtatggagccgacagatcatttttcctggtcaatggctcaacagtaggaaaccttgctatggtctacgccgtatgccaacagggcgatacaattctggttcagagaaacgcacataaaagcgtgtttcacgcaatcgaactggttggagcgaaacctgtgtatcttgctccagaatgggatgaccatacccgttctgccggtgttgttccgctggaaacaattaaagaagcactgagagaatatcctgaggctaaagcactgtttctgacatacccaacgtattacggagtcgtagccaaagatctgcgcgaacaaattgaactgtgtcatgcacaacagatcccggttttagtggacgaagcacatggcgcacattttacagcgtccaaagaatttccgatttcagcactggaactgggggcggatattgttgtgcattctgctcacaaaaccctgccggcaatgacaatggcgagctttatgcatattaaatcgaagttcgtctcagaccaaaaggtaaaccactatcttcgaatgctccagtcaagctctccttcgtacttattgctcgcttcacttgatgacgcccgccattatatcagcaaatacaaggaatctgatgccgtgtattgcttagaaagacgcaaacagtggattgaagcactggaaagcatcccggaactggaactgattgaagctgatgaccctcttaaagtctgtattagaatgaccggctatactggaatcgaattaaaagaagcaatggaagagaatctgatctatccggaacttgctgatattgaccaagttctgcttgtgttaccattattgaaacatggcgatttgtatccgtacgcggaaattcgtatccggatgaaacaagtcgtaacgcagttaaagatgaagaaaggtagcgggcaaccacagatgggaaaacagtataagatggcctcaattatcacaccgaacgctacgtttgccgaaattgaggcaaaagaaaaggagtggattccgtatatgcgatctatgggcaggatcgcgggcggaatgttaattccatatccgccgggcattccgctgtttgttccgggcgagaaaattacagtatccaaactgagtcagctggaagaactgctggctatcggtgcagcgttccaaggggaacatagactggaagaaagattgattcaggttctcaaa

SEQ ID NO: 317 - DNA, 2349 bp, Fusobacterium nucleatum
atgtccaaattggaccagaacaagaccccattgttcaccgttctcaaggatgaatacgtgcgtcgaaacatcctgccgttccatgtgcccggccacaagcgtggcaagggcgtggataaagagttctttaacttcatgggtgaagcacccttttctatcgacgtcaccattttcaagatggttgatggcttgcaccatccaaagtcctgcatcaaagaggcgcaggaattgctggctgatgcgtacggtgtcaagcattccttcttcgcagttaacggcacctctggagctatccaagcgatgattatgtccgtcatcaaggccggcgagaaaatcttggttcctcgtaacgtgcacaagtccgtctctgctggcatcattctgagcggctccgaaccggtttatatgaatcccgagattgatgaaaacttgggaatcgcgctgggcgtgaaaccacagaccgtcgaaaatatgctgaagcaagatcctgacatcgcagccgtgcttatcattaacccgacctactatggcgtcgccaccgacattaagaaaatcgctgatattgttcattcctacgacatcccgctgattgtggatgaggcccacggcccccacttgcacttccacgatgaattgccaatctccgctgtggatgcaggcgccgacatttgtacccagtccacccataagatcttgggtgccatgacccaaatgtccgtgatccacgtgaactccgaccgtgtgaacgtcgagaaggtcaaacagatcttgtccttgctccacaccacctctccgtcctacccattgatggcatccttggattgcgcccgtcgtcagattgctacccagggccaagagttgctgacccgcactatcgaattggcgaagtacttccgtcgagaagcaaaccgtatcccaggcatctactgttttggcgaagaattgatcggcaaagacggtttctttgcgttcgatccgaccaagattaccatctccgcaaaagagttgggcctgaagggcggcgaattggaatccttgttggtggatgactacaatatccagatggaactgtcagactactataacacccttggtctcattaccatcggcgatactgaagaatccgtgaacaaattgctggatgcgttgcgtgacatctcccgtcgtttcttcggcaagggcaagaagttggaaaagaacatcattaaactgccagagacccctgaattggtgctgatgccccgagaggcattctactctgaaaagaacaaggtgccattcaaggaatccgtgggcaagatctccggagaaatgatcatggcctacccaccaggcatcccaatcattatcgctggcgaacgtatttcccaggatattatcgactatatcgaagagttgaaggaagcagacctgcacatccaaggcatggaagatccggagttggaaaccatcaacgtgattgaagaggaagatgctatctacctgtataccgagaagatgaaaaacattcttatcggcgttcagaccaacttgggcgtgaacaaaaccggcaccgaatttggtccagatgaccttattcaggcataccctgataccttcgacgagatggaactgatctccgttgagcgtcaaaaggaagatttcaacgacaagaaattgaagtttaaaaataccgtgctgaacacttgcgagaagatcgcgaaacgtgttaacgaagcagtgattgacggctatcgaccaatccttgtgggcggcgatcactccatctccttgggctccgtgtccggcgtgtccttggaaaaggaaattggtgtcctctggatctccgcacacggcgatatgaatacccctgaatctacccttactggtaacatccacggcatgccgttggcattgttgcaaggacttggcgaccgagaattggtgaattgtttttacgaaggcgcgaagttggattcccgcaacattgtcatcttcggtgcacgcgagattgaagttgaagaacgtaaaattatcgagaaaaccggcgtgaagatcgtctactatgatgacattttgcgtaagggtatcgataacgtcctggacgaaattaaagattacttgaagatcgacaacttgcacatttcaatcgacatgaacgttttcgatccagagatcgcaccaggcgtgtccgtgccagtgcgtcgtggcatgtcttacgatgaaatgttcaagtccttgaaattcgcctttaaaaactattccgtgacctctgctgacattactgagttcaaccccttgaatgacatcaacggcaagaccgctgaactggtcaatggtatcgttcagtacatgatgaacccagattat

SEQ ID NO: 318 - DNA, 3093 bp, Eimeria brunetti
atgaatggacggcagcatctgttttatgtattagtgttagttcctccttgcacgtatctgaaaaaagaccatcgcctgaatctggcttccgaattacgtagaattagcagcacggaaacactgaatccgtctccgaacccggacgaaggtctggaataccggattgtggaagtggacagcatcagaaaagcgttgttagctgtgattattaatcctgaaatcttggcggtctgcattcaagataatgtccctatggaaagcaatgcaggtcctccgctgtcacctttatccagattgtccggctttgtacgcggcttagcacgttttgttgaaggaccgcttagcaaaattcgtcttggtgcccctccgctgccgacacttatcgaaggtttaaatagctctcgccggggattggatatttactgcgtgtgcacaaacatgggtttaacaacggctggtccggtagaccatcttgtacgccgggcgtttgtccctacagaagaccatagcgacctgcatgaagcattgattgaaggtgtgagagcaaaagcgcggtgcccgtttttcggagctttacgcgcgtacgcgcagagacctattggtgtatttcatgccctggctgtaagccgcggaaacagccttcgtcgttccaaatgggcgcatcgtctgctggatttttacggtgcggctctgtttaaagctgaaagctccgcgacgtgtggtggtcttgactcactgcttgacccgcatggttctttgcttgaagctcaaagactggcagctcgtgcttttgatgcgtcctacgcgtttttcgttacgaatggtacatcaacatcaaacaaaatcgtgctgcaagccttaacacggcctaatgatgtggtgctgattgacagagactgccataaaagccatcattatggtttagttctgagcggagccagaccttgttatttggacgcatatccgctgcatgcctattctatgtacggcggcgttacacttaaaacattgaaacgtgcgttgcttggatttcgcgccgaaggtagattacaggaagtccaagtgcttgtgctgacgaactgtacatttgacggaattgtatataatgttaaaagaattatggaagaatgcttagcaattaaacctgatattgtctttctgtttgacgaagcgtggtttgcttatgccggttttcatccgattttaaaaacaagaacggcgatgcattgtgcaaatgaactgcggaaagaacttatggaacgtaaatatcatcatttgcatgctgcacttctggatagattacaagtctcctctttagatgcggccccggcgtccgcccttttgggccttagactttatcctgaccctctgaaagcacgtgttcgtgtttacgctacacaatctacacataaatccttgacgagcttgcgtcaaggctctatggttttggtgaacgatgacaaatttgaaagccatgtgcatacggcctttaaagaatcatattactcccatatgagcacgtcaccgaactatcaaatccttgcaacactggacgtcggtcgttcccagatggaattggaaggttatggcttggttgaaagacagatcgaagcagcgtttcttattagaaacgccttaggttctgatccgtttgtgaacaaatactttcggatcttaggtccgcatgacatggtccctgcgagcttgcgccagtcctcattacaacaatcaagcggtaacaaaacagaaaacggtagaatgaatgtccagtcactggaagaagcgtggcttagcgatgacgaatttgttttagaccctacacggattacactttatacgggccaatctggtttagacggagatacgtttaaagaattagaaatgcgtagactgttgtcctctcgtcgcgaattagaagaattacagaaacaaatcgactggattgttaaagattgtcctgcgcttcctgatttttccggctttcatcctgtatttgctattttgcctcaacagcagcaacaacaacaacagcatcaactgcagcagttgcaacaacaactgcagcaacagcaacaactggttcaacagttgcagaaacagttacagcaacaacgtttaggaaatcgcaacgcagcggcaggtgcggcaacaggagaagcgacaacgggagctgcggctggcggcgctgcagcggcagctgcgcctgcagctgctgcagccgcggaaacggaagatgaaggagaaaaagaagaagaagacgacgtgtccccggtttccacacctacgtccatcgacggctcagtgaaaaaggaaaatatgaacaaaggtccttctttaaacttaggattaaatctgaacccttatctaaatcttaacaaacaacagttgttgcctcttccgaattgcacgtcctcttcatcctcttcctcttcttcctcatcttcaagcagctcctcctcctcttcagaagatgactactttaaagaatccgtacgtgacggagacgttcgggaacctttttatttgtcctacgacgaagaaaatgtagaatattacagcctgcagcaggcacttgaccttatccagaaaggcaaaattttagttggaagcacattcattatcccttatcctcctggctttccgatttctgtacctggtcagattatctccgccgccattgttgaatttatgattaaaatcgacgtcaaagaaattcatggctttgatcctaaattgggccttagatgctttaaagaatcattaattaactcactgatgcagtcccgcggtattaaactgcagcagcagcagcaacaacaacagcagcaacaacagcaacagcctcagcaacctcaacattatgatattagcggtgaagccgaagaacaggaaaacaacaattcttcttccccgacaacaacagcgagcttattacggttaccggaccctaaccagcgtctgcagcaagaattacagcaagaactgcagcaggaattacaacaggaactgcagcaagaattgcaacaggaattacaacaggaacttcaggaacttcaacaagaacttcagcggcagcaacaacagcagcaactt

SEQ ID NO: 319 - DNA, 1479 bp, Acholeplasma palmae
atgaagaaattgaaccagctggaaaccccattctttactaagctgaaagaatacgccgagtccgataccgtgccgttggacgtccccggccacaagctgcgtaacatcgaggatgacttcttgaagtacatcggtaacaatgcgttgcgcctggatagcaacgcaccacgtggcttggataacttgtcaaagcccaaaggtgtgatcaaggaagcagaggccctgatggctgatgcgttcaaagctacccacgcgcacttcttggtcaacggcaccactcagggcattctggcaatgatcatggccacctgccgtgctaaggaaaagatcattctgcctcgaaacgttcacaagtccgtgatcaacgcgcttatcctcagcggagcaatcccgattttcatcttgcccgaactggatgaggacttgggtattgccaaccagatctccttctccgctttggaaaagaccatcctggagcacccagatgcaaaagccgtgttcatcatcaaccctacctactttggcgtgactgcggaccttgaaaagatcgtcaacttggcacacgagaatgatatgttggttctggtggacgaagcacacggcgcacacttctccttcaacgataagttgccactctcggcaatggaagctaatgcggacatcgcttcttgtagccttcacaagaccgtcggctccttgactcagtcctctattttgctgaccaagggcgatcgcatcgaccaggaaagacttaaatccaccctcaacatgattcaaaccacctctccatcctccttgctcatggcgtccttggatgtttctcgtaagaccatctaccagcacggccagaagtccttcgatcacttgttgtccatgctggacaagacccgcgaaaaccttaatcagattcccaacgttaaggcattcgccaaagattattttatcgaccgtggctacaaggattatgaccaaaccaagttgatcattaaagtgtccgaaatgggcctgactggttttgaggtctaccagattttgtctgatgtttatcacatccaattggaactggcggagacccacttggtcctcgcagttctgtctatgggcacccgtcaggaagatcttgaccgactcacctacgcattgaaggaactgtccgatcaacacaagggcaaggaagcattggagttcgagatcattaaacgactgccagagacctacatccgtccacgtgatgcttatcatgcgccaaagaaattggttttgttggaagaagcaattggcgaagtgtccgctgaatccttgatgatctacccacctggtattccattggtcatcccaggcgaaatcattgataagcaggttatcgaagacctgaacttctacgagaagcaaggctccgtgatcttgtcagataccaaagcaggctatatcaaggtggtggataaagaagagtgggaaaagtggtccgagaaagacatc

SEQ ID NO: 320 - DNA, 1404 bp, Alicyclobacillus sp.
atggatgaaacccctatcctgcgtcagttgctgggcgcagcccaagccgagcgattgtctatgcacgtgccgggtcaccattccggccgtgatatgcccgcattgttgggccagtggctgcaatccgcgcttcgcatcgatttgaccgaattgccaggcttggataaccttcacgacgctactggctccattcttgcgtctcagaagttggctgcgagccattacggctcccaaggctgctactattcggttaatggctccaccgcatgtgtgatggcagccatcttcgcatccgtggatgaacgccacagagacgtggtcgttgctggtccgtttcattggtccgtgtggcgtggcgcacagctggcacgtgccaagttgtggcgattggcacccgtctgggatgaaaaccgactggagatgttggtgccaccaccagaggctatcgcgaattggttggctgaccaggcgcaatcccactcttgggctgcgatcgtggtcacctctccaacctacactggccgcgttgcagatattgacgcatacgccagactggcccacgaatataactgccctttgattgttgatgaggcacacggcgcacacttgggtttggtgaccgatctgcccccacactccgtccagcaaggcgctgacatcgttattcactctgcgcataagaccctcccggcattgacccagactgcctgggtgcaccatcaaggctccttgctgtccgcagaacgtttgaaatctgccttgtccttcttgcagaccacctctccatcatacttgttgttggcttctctggacgtcgctcaggcgtggttgcgttgcgaggcagctggcgatgttctgcaacttcagcaacacttgtcaatgttggaccgttggcgaaacgtctcggatgcagacccactgcgcatctggattcctaccggctccaccaagcgtgcacagctgcttaccgaagcgttggaaaaagagaacatcttcgcagagtacgtcaatgttgcaggcggcttgttgattcctccgtatcacctgagccagcgcgataccgtgcgtttggaagcattgttggtgcgttggcaactggagtccggcgatcttgacccaaagttgttggccatcctgcaggcagtggccgaatgcacccctcaaaaatgtttggatactgctgaccactttcccccacaggagacctgcgttgtgtggcaatcaggtcattcggcggttggacgtatctccgctgcgtgtgtgattccataccctccgggcatgcccatcctgttgccaggcgatgaaattcgtcgagaacacgtggaattggtggcatatctggaggcttccggtgcgatccctgtgggatgcaagccaggctgtcagtttcccgtcctgtct

SEQ ID NO: 321 - DNA, 1383 bp, Alkalibacter saccharofermentans
atgaagtcccgtttgtacttgaacatcgagtccaagcgtaagaacgcaaatttccacatgccaggccacaagtcccgtgatttcaccaaactgggctgggaatattttgataccactgaacttgagggcaccgacaacttgaacaacccacagaaggagatccgtgaaattgagcgacagatctccaagtcctacgcatcgaaagaatgcatcatttccgtcaacggctctacctctttgatcatggctggtattatgggctcctgccgcgaaggcgattgtgttgccgtggctcgtaactcccacaagtccgtgttctccgccatctactatggccgattgaaaaccctgtttattgatccggttctggaccccatctacggctatccggtgggtattgaccttaagcacttggaagccgagcttcgtaaaacccgtgttcgtgcattggtaatgacctaccccacttactatggcacctgcgatgacttgaacgctgtgaagcacatctgcgattctcacgacgtcttgctgattgttgatgaggcacacggcgcacacttcaagcactctatggagttcccaccatcctccatcgatattggtgcggacatcaccattcattccactcacaagatcttgtcctccttgaaccagggcgcagtcctgcatgttaaatccgatcgtgtggatatggaaaatatccgtcgtcacatggccatgttgcaaacctcttctccatcttaccctatcattttgtccgtggaagaggctgtcaagttcatgaacgaaaatggcgaaaagaagttggaaaagatccagggtttctatgagcgtgtgaagaaagcgcttgaaggcaccaagttcaccctcatccacgataaaatttcccgagagatcttgcaagtggataaggccaaaatctggctggctccaggcggtgttggcaagattcttgcggaggattacaacatcgacattgaattggatgacggtaaaaccgcactgtgcatgatgggcgtgggcaccgtgatcgaagatgtggaccgccttattaccgccctcaaggacatcagcgagaagggcttgttcaaagattccctggaagactctaagcgtgcgctgtttccgaaggctggtaacaaagtgatggaagcgtgggagatcgaccgcatgaagaagcgtatggtctctattaagaaagcagccggcaaggtttccgcatcttaccttgtgccatatccgcccggtgtcccagtggtctgcccaggcgaaatggtttccgatgctgcggcagactacttgtatagcatgaaggaaggctccgtggatggcatgatcgaagacaaaatgatctacattttggatgaagaacagaccctg

SEQ ID NO: 322 - DNA, 1470 bp, Geobacillus kaustophilus
atgtctcaactggaaacgcctctgtttacgggtcttctggaacatatgaaaaaaaatcctgtgcaatttcatatccctggtcataaaaaaggtgcaggaatggacccggaatttagagcgtttatcggcgataatgcgttagcgatcgatctgattaacatctctccgttagatgatttgcatcatcctaaaggaatgattaaacgggcgcaagaacttgcagctgaagcgtttggtgctgactatacgtttttcagcgttcaaggcacatctggtgcgatcatgacgatggttatgtccgtggcaggtccgggagataaaatcattgtcccgcggaatgtgcataaatccgtaatgtccgctatcgtattttctggtgctacgcctatctttattcatccggaaattgacaaagaactgggcatttcacatggaatcacaccgcaggcagttgaaaaagcgttgagacaacatccggatgcgaaaggcgttcttgtcattaatccgacgtactttggcatcgcaggtgaccttaaaaagatcgttgacattgcccattcctataacgtgccggtcttagttgacgaagcacatggagtgcatattcattttcatgaagatttaccgcttagcgctatgcaagcaggtgcagacatggccgccacgagcgtccataaactgggcggttctctgacacaaagctccatcctgaatgtgcgcgaaggccttgtcagcgccaaacatgtgcaggcgatcttaagcatgctgacaacgacaagcacatcatatctgcttttagcgtcactggatgttgcacgcaaacagctggcaacaaaaggaagagaactgatcgacaaagcaattcgtttggcagattggacaagacggcagatcaacgaaatcccgtatttgtattgcgtgggcgaagaaatcctgggaacagaagcgacgtatgactacgatcctacgaaactgattatctccgtgaaagaattgggtctgacaggccatgatgttgaacgttggttacgcgaaacgtacaacattgaagtggaattatccgacttatataatattctgtgtattatcacaccgggcgacacagaaagagaagcgagccttttggtcgaagcgcttagacggttaagcaaacagttttcacatcaagcagaaaaaggcatcaaaccgaaagtccttcttccggatattccggcactggcgttaacaccgcgcgatgccttttacgcggaaacagaagttgtgccgtttcatgaatccgcaggcagaatcattgcggaatttgtcatggtctatccgcctggtatccctatttttattccgggagaaattatcacggaagaaaacctgaaatatatcgaaacgaacttggcagcgggcttaccggtacaaggtcctgaagacgacacattacagacactgagagttatcaaagaatacaaaccgattaga

SEQ ID NO: 323 - DNA, 1164 bp, Desulfotomaculum ruminis
atgaaggagttcttcaaattgccgtggggcaaggtggagggactggcacaggaatacggcaccccattgctgatcttgtccctgaaacaggtcgagcacaactacgagttccttcgccaacacttgccaggcgtgaagatcttttatgccattaaatctaaccctgatttgcgtctcgtccaaaagttggctgagatggattgcagcttcgacgttgcgtcagaaggcgagatcacctctttggtgtctatgggcatctccccggaccgtatggtgtacgcaaaccccgtcaagacctataaaggcttggaaaccgccggcaaaaccggcgtgcgtgatttcaccttggatagcgaatcagagatctaccgtattgctcgatcaaacccacaggcgcgagttttggtgcgtatccgtgtcgataacaatcactccttggtggatttgaacaagaagttcggcgcagatccaaaggacgccatccctctgatgcttctcgcaattcaggaaggcttggaagtggccggtctgtgtttccatgtcggttcccaaaacacctctgctgatgcgtacttggacgccctgtccatctcccgtcgtattttcgatgacgcagccttgcaaggcatccaccttaagatcttggacatcggcggcggcttcccaattcctaccggcgatttgaacatggacatggcatccttcatggatcagatccattacggcttgcaatccctgtttccagacaccgagatctgggcggaaccaggccgttacttgtctggcaccactatgaacttgatcactcgaatcattggctcccagattcgcaatggccgtcagtggtactatcttgatgaaggaatctacggcaccttctccggcatcttgtttgaccactgggaatatgagatggaagttgctaagaccaagaagggtccagagatcgaagcaactttcgcaggcccatcatgcgattccttggatgtggtctttaaggattacaaaaccccacctcttgagatcgatgacttggtcctggttgctaactgtggtgcgtattcctctgcatccgccaccaccttcaacggatttgctaaggcggaaaccgttatctgggaagaggtggaagagaagttgcaggaagagattaaagcagtgtcc

SEQ ID NO: 324 - DNA, 1440 bp, Anoxybacillus flavithermus
atggatcaacagcgtacaccgctgtatactgcgctcaaacggcatgactcgattcacccattttcattccatgtaccgggtcacaaatatgggatcgtttttccgaaagaagctaaggatgactacaaacaactgcttaaactggatgccacagaactgagcggcttagatgacttgcatcaccctgaatcagttattgcggaggctcagtccctggcagcgaaactttacaacgttgaagctacatttttcctggtaaatggctcaacagttggaaacttagccatgatctttgcagtttgcggagagaaaaagaaagttatcgtccaaagaaactgtcataagagcatcatgcacgcactgcaactggttggcgccacaccggtctttctgccgcctgaatttgatgaggacgttagagttgcgagctatgttgcttacgaaacaattaagaaagcaatcgaactgcatcaagatgctgccgcattagtgttgacaaatccaaactattacggaatggcagttgatcttacggaagttgtgaatattgcgcatagataccgcatccctgtgttggtcgatgaagcacatggcgcacattttgtccttggcgatccgttcccaaaaaccgccattacttgcggcgcagatgtcgtagttcagtcagcacataaaacacttccggcgatgacgatgggaagctatcttcatgttaattcatcactgatcgataaggaaaaactgaagtattttctgcaagtcttccaatcatcatcaccgagctaccctatcatggcatcactggatctggctcgctcctatctcgcccgtctgacgcggaaggatattgaagacatcttcaagcaaatccaacagctcaaggatgctttagacgaaattgagggcatcgccgtggtccattctcagcaccctttcgttaagacagatttattgaagatcacaatccaaacgcgttcccagcttagtggttacgaattgcaacagcggctggaacaagaaggcatttttgcggaactggctgatccgttcaatgtactcctggtttatcctttggcagtagttgaaagactggaagaagttattaagaaagttaaacgcgcgtttcatggattatcctacagtgaagaactgttacactcatttagagcattttcgttctcagcatcatcagcggctattagctacaaggaacttcaaacactcccgaagaaagttatcgatctggaaaaagctgagggttttattgccgcagaaacaatcacgccttatccgccgggcgttccgctgctgtttatcggagaaagaatttcaagagaacatattgagcagatcaaaagactgaaatcataccatgcccgctttcaaggcggaaaattcctgtcatcagatcagattgaagtgtatagcacaagcaaaaaa

SEQ ID NO: 325 - DNA, 7470 bp, Plasmodium malariae
atgaactcagtcaatgactccatgtacagtggcgatacaaactctctccatgtaaattccctgtatgaaaacaacccggataagagcgttaaaaatatcaacgctgtgaacgactacatcacatcaagcaacgccatgtctgaagaagcagaaacggcagcgggaaatgatgaactgattccgaatagctcatcaaaccatatccacagccaatataaacatcgtcaccaatacaagcagtatcatcaatacaacccacataatcagcacaaacaacatcaccagtacaagaaactgcatccatacaagcaataccaccaggaaaaagaactgccgaagtaccagccactgccgcaatatcagcatagcacacaataccagggctctaaaccgcattcccaaagtcagctgcacgatggcggcaagaaaagaagagaaaaaggcaaagtggagcgcaacaaatacgataagattgaagaactggaaaagtatatcaacatcaacaacgccacaaacgtctgctcattgagaattaaactgtgggaagcacttatgctctacgttaacaacctgaagattgaacttgtgtacttcatcatctactgtcttgaagagatcgaagtgtattggggcgaagaagcaacggacaatcttcgggatattatcaacttaattaatgataagaaatataaagaagtcttaaacaaaatcggagagacactgtcatcactgtcagtaacaacgggtaaaaccactgaagagaatccgtttttctatacgctgattgtcagcggccgtcgggatgaaaacaacaataacaataacaacaactcaaacaacaactacaactacaacaataacaatagcgatctgggatgcgaattgaacaaaattctccattacgagcacaatcgtttgtcgaaccaatcaaacaataagaaactggaatacaagatcatcgaagcatcaaacgccaaagaagcactgctggcgtgtttaatcaatcctcagattctgtcagttgtgcttgttgataacttaacaatcgatgaagagaaagtaaaggaacgggactactacaaattcaatgaggataacatgctgaacgctaattgcgccaatagctcttatctgttgaactgtaatcttcaaaacaatacgcagatggttatgaagaacccgctcaaccataacggcatgatgcactcaggcggcgttacaacggtacaaaactctaaagatgtcctcctgattggaaattcaatgttgcctgaatatctgaacaacaacaacgtcaacatcaatgaaaactcaaatgttagatcactgagatcactgtatatcaaacgcaattacaagttcgacatcggcgattttgttattggatatgaacagcttgtgtctgcaccgctggagaaaatgaagaaaggctttaatatcctggttattcttatcaaatcaatcgcatacatcagatcatcagttgatattttctgcgtatgtaccagcatcacactggataaattgcattctgtaaacaacaaaatcatcagaatttttacaactcatgatgaccacagtgacttgcatgaatcaattctggatggagttaaaaagaaaattaaaacaccgtttttcaatgcgcttaaagcgtatgcagaaaggccaattggtgtctttcatgctttagccatctctaaaggcaattcagttagaagatcaagatggattcaatcacttttagatttctacggcgttaatctgtttaaagcggaatcatcagctacgtgcggcggacttgacagcttgttagatccgcatggctcactcaaagaagcccagattatggctgcaagagcgtatggctcaaaatactgctttttcgtgacaaatggcacatcatcatcaaacaaaatcgttatgcaagcgcttgtgaagcctggcgacattatcttagttgatcgtgcttgccataaatcacatcactatggatttgtgctgagccaggcgcttccgtgttatcttgatccgtacccggtttcaagatatggaatctatggtgctgttcctatctatgttattaagaaatcactgctggattaccgtaactctaacaaactgcatctggtcaaactgttgattttaaccaactgcacttttgatggcatcgtttacaacgtgaagagaatcatcgaagagtgtctggccatcaaaccagatctgatttttctgttcgatgaagcatggttcgcgtatgcatgctttcatccgattcttaaatttcgcacagccatgacggtagcagagaaaatgcgctcaaaggagcagaaaagaatctattacaaggttcataagaaactgctgaagaaattcggaaacgttaaatcactgaaccaggtatctgcggataaacttttaaagacacggctgtatccgaatccttctgaatataaaattcgagtgtacgctacccaatcaatccataaatcccttacatcactgcgtcagggctccgtcattctgatttcagatgacaatttcgaaagccacgcgtacacgccgtttaaagaagcatattacacgcacatgtcaacatcacctaactaccaaatcttggccacactggatgcaggacgggcgcagatggaactggaaggatatggtcttgttgaaaaacaaacggaggcagcgtttttaatccgaaaggaattgtccgaagatccgatgatctcacgttacttcagaattttaaacgcggaagacctgatcccagattcacttaggcagtgcgctgtcagctacatgaaacgcaaaaagaaaattattaaagaatacgattcatcagattcaagatgctcagcgaatgtcacatatagctgtgtatctaacaataacacaagaggcattgttgacccgagcgattctggcaaatattacctgtctggagaacaaaatgtcgtacattcagttaacgcatcatcatttgaatgtgtgcgcggcacaaatggcgcaacaaacagcaatcatacaaataactccacaacgagtaataaccgggcgaactctcctgctcgaaattgccatgttaaatcaccaacttcaaactaccacacaaataactgtccgacgtcaattcatatcggcacatcagttatgctttcaaacacaaattcaaacaacatcgtccagggaaacaacaacaacaacgtaaaatcttccaacaatagccctcgttctgcgttaaatggcgttgctgccaaaagcacagaaattgtggagtcctatacgagttgcaatatctactcggaagactcagattaccaaaaagtttcaaaatcaggaaacatcaagaggtacattaagaaaaagaaaaatcagaattgcagagaagccccgtgtgtcagctatgatggtagcaatttttctggggcaaactctgaaaactgcgagaactgtgaaaatagcaaaaattcaagaaattcaagaaattcacaaaatagcagaaactctcgcaattcccaaaattcacaaaattcagaaaacgagaatctgtcatttcttgaaaatagcaacaacaaaagatacaacaacagctatggttattcatcagggctgaaaaattttctggaatacttcgaatgttcatggttaagcgaagacgaatttgttcttgatccgaccagaattacactgtttacaggatactctggtatcgatggggaaacgtttaaagtaaagtggcttatggacaagtacggcattcaaattaacaaaacctctattaattccgttttatttcagactaacatcggcacaactggatcaagctgcctgtttctgaaatcatgtctgtcactgatttcacaagaattggatcaaaagaaatcactgtttaatgaacgcgacctgaaccagtttaatgagaacgtctttaatcttgtatctaactacatcgatctgagcgaattttcagaatttcatccgctgtttaagaaaagatacacagaccctaagatttttaacaaagaaggcgatattcgtaaagcattttatttggcgtatgaagaagattacgtggaatacatcttgctctctgatcttaaggaaagaatccgccagaatgagatgattgtctcggcgagctttattatcccgtacccgcctggttttccagttctggttccgggccaaatcgtttcacaggaaattgtggattatctgtccggattgagtgttaaagaaattcatggttacgacgagaatatcggctttagatgcttctacaacttcgtcttggaatacttctacaacatggtaatttctgacccttattccctgtaccagaaaattgataaggagacgtatgaaaaactgaagcacatgagcttgtctaagagaaaatcactggaatcagtttgttatctgtacatctatgataacgaatctaacaaaatgaagaaagtctatctttgcagtggcaatgtttcaacagaaaacaataccattgtgtcagacacctgtgatgaaatcactcagaatcatgcgagacgcagctacaataagaaaggcaaacaaacatctatctatgaaaacttctcaaaatcagctcagaacgccggaaatgcaagcggggtcggcaacgtatctggtaaaattgggaacatcatctacggcgataacttcaacaactgcgctaatggaaaagacatctgtcatcatctgtatggcaaagaagaagaaggctttttcgacgttaacgatgaaaatgcgtttggcaacgatgtgctccatctgaatcactatgctattaaaaaccctctgaagaaaggaacaacggaaacgtttattaagaaaacatgcaaccaaaaatcttcctggaaggagaaaattacggataagtatcatggcacaccaaacggaacacgtcgggacaagcataacgttctgtcaagcaaaaagaaagaaaacggtagaaagtgtaagggcattcaagttaataacaacaataataacaacaacgtgatcttaatcaattcggaaagctatgatcatgatcagaaagttatcgacctggtggatacaccggaaaaatcaaacaaaaactacgagtgccatgaacacgacggacgggataatgatgacgatgacgatcgacactcaggcggcggctcaaactacaatagagactcaagcaacaattcacataatgtggatcgtaaaagatatgttgtgggcacggacaaacatagcggatcttccaacacccacaatgttggcacagataaacatagcggaggttctaatacacacaatgtgggtattgataaacattcaggcggctcaaacacgcacaatgtcggcatcgacaagcactcaggcggctcaaacacacacaatgtaggaacggacaagcattcaggcggctcaaatccgcataacgtcggcacagacaaacatagccactctggctcatcaaacaataacaaacgtagccttgaacgcaaaaagaaaagaaacgagggcaactacatgtccctcagttacaaggcaaacatctatggtcataaggtcgtttttaatagagggaataacaataacgacgatgcgaacgtaaaagcatataacgaaaaggatggcaaaggcggcgaaagaaacaacaactgcacattctacgataagaacgttaacggaatgaaccgagaaagatcactgaaaaatatctcctacatgagtaacatctcggaaatcagaggaatgaacaatgttaacaatgtgagacgcaaaaatcgcattgatgaaggcaaaaaccgtaatatcaagggaacagacgattctgattatctgctttccgaagtgacggccaatatgagcaaaaacattggcccgatttcagacatctattccctgaagaaaatttcaaaactgaaccggtctgacgatggaaaatacgaaaattcattgtcagattacgtcccgaaactgaaatcatcaaacatcgtcatctataacaaagttaagaaaaatgcattattgatgggtagaaaacacatgagtgatggcaaatcaagaaacaatcatcaccgcaaaaattcacacatgaaccaaaaatcaaacaaagactacgtctactactcagattcatcaaagaaaattaatgaaatcatctatatgaaacggcaggacggcgatctgacagaggaaaacgcgatcgttaaggaaaatctgaacgaactgaatagcaatctgttttattcaaacggaacgggtaacaaaggcggcgatattaaaggaccggagaaaaattcatcaaacaattctggtacgctgagcggcacaaacaatggcaacaatagcaattcaagcatccaaaactttgccaacgtgaatgaaaaagcaggcggcattacgtttacaactccaaatatcgtcgcggacgaatattgcgataagaaagagattccgatcaaaagaggaaataatagcggcgataacaatgggctgaactctggccttaattccggatataacagtggccataatggagttcacaactcttgtaatgattcttccaacaaaccgattatcaacgaaggcacaggctataacaattcataccatagcgaccaggatgctaacaaatctaacgaggaaaagtacaagtcaaacggtcttatcaggcctaacaatctggaaagaaacatcatcttgggcaacgaaatcatcgtagagaaggataacaatttgagctaccgtaacatctctggacataacctgaacgaaacaaatagctatgtttatgcgaacgatggcacaatcgctgaaggtcattatgggaacaataacatggctcggggttccaatatcgggtgctcagacgatattgagggcagcgaagacatcgaaggcggcgaagatattgaaggcggcgaagacatcgaaggcggcgaagatattgaaggcggcgaagacatcgaaggcggcgaagatattgaaggcggcgatgatattgaaggtagctacaacatcagatcatcatcaaacatctatatgggcaattcaaatgcgattagcgatgtcgctcaagtaagcggctctgtcaacgacgccaatatttcaaacctgatgggacatgttaaagatgaaatcggcttctgtggcaaaaattttctgtacagcgaaaacgaactgaaaatgaacgcactgctgcgcgaagaagaaaaagataaatcaacaattcgtaaccttaacactttaaacaacaacagctacatcaacaatcttatcacaaacgttgatgatgacacgtttatccataaagaaggaaatttctttctggaatgcacattgacgaactctgaaatgaattgtagctcttttgagatggatatgtcacttaacaacatctatccgaatggcggcgaacatgttaaacagcaccgcaagtatgatgacgatctgaagaaagaattt

SEQ ID NO: 326 - DNA, 1611 bp, Paenibacillus alvei
atggataaacacaaggaaacgtcacaactcgcgctggctggccaggaacatgttagagcaccgctggttgaagcactgctgaaatataatcaaaaccagcatgctagctttcacgtgccgggtcataaagatgggaagtggtatgcccatgaatcactgtcactgagcggccgggaagattggaacacactcttgcataagatgtctctcctgcttacaattgacgtaacggaagttgagggcacagatgaccttcatcaccctactgaagccatcgcagaggcgcaacagttagcagcgcaatgctttggcgcagaagaaacacattttctggttggcggctcaacagtaggaaacattgcgttattgatgtcctgctgtatccaaccgaatgatgttgtgctggtgcagcgaaacgtccacaaatctgtactgcatggcctgatgatggctggcgcaagagcagtctttctggcaccgcagatggataagggcagcggacttgcgacagctcctaataacgacacggttgaacaagcactgcaggcgtatcctaatgccaaagcactgtttgtgacaaatccaaactattacggtatggggattaacctgtgtgaacttgcggagatggttcatcgatatgatattccgctgctggttgatgaagcacatggcgcacattacggattacatccagcatttccggaatcagcgttgcaagcgggcgctgatggagtcgtacaatcaacacacaaaatgctgggcggcatgacgatgtccgcaatgcttcatgttcaaggcgcgcgtttgaatagaacacgcctgaaaaaactgttaacgatgctgcagtcaagctctcctagctatccgctgatggcgtcattagatattagcagatactacctcgcacgtaatggtcgggaagcgtttgaagaaggcctgaaagctgtgcaacatgtccgcgctgccctcgtcaacttgacagtatacgaagttatcgagatccaaacggctaaaccacagtctgcctactgctcccttgatccgtttaaggtaaccatccgttgtactaatggtcaattatcagggtatgaactgctggaacggttgagcgaatacggttgcacggcagagatggcggatcttcagcatgttgtgctgtcattttccctcggctcatcactggaagacgctcaaagacttattaccgccttacaggccgtagcagttacattagatgacaacacaccgtacactaagatccaagttgctacatacacggaaaacattgatacaccgggcagatcaatcacttttgccgacgggcaacgcatgtatagcgaaccggtttcattttcgatttacgaacaggaatcagttcgaacaaaaagagtttcagttcacgaagcagtgggacataaggcagcggaatctgtcgtaccgtatccgcctggcattccgctgctttaccctggagaaattatcacagaggctgccgcacaggaactgatcatgctggcgcacgctggcgccaaatgtcatgatgcggaagacgaatcactgttgacagttcgggttgtggtcacggaagatgagaagggaattgaagac

SEQ ID NO: 327 - DNA, 2367 bp, Escherichia coli
atgaagttcaaccacaacttgttgttcatctcctcccaatacctggacggcgataacccatcccagcaagtgttggaagaattgcagaccgagcttgcagaacgtggcttcaagatccacattactcatcaaatctccgacggtttgaagatcattgaaaagtccccacagtactccggtattggattctattgggaaccggataaccccacctttgcagaagaattgcaacacttcatctccatttttcgcaagagaaacgccaccaccccattgatcattttctctgagcagaatatcaccgaccgtattcccttggatgttctgaaggaagtgtccgaatacgtctacttgttctccgaatccgcagcctttaccgctaaccgcctttactccctcgtgcacagatatgcggataagttgttgccaccatacttcaagaccctgaaagactttactgaggacggcgattactattgggattgcccaggtcacatgggcggtatggcatacttgaaacatcctgttggcatcgagttcattaacttctttggtgaaaacatgatgcgtgctgacatcggtgtggcaaccgccgaaatgggcgattaccttatccacgcaggcccaccaaagaagtccgaagagattgctgcgcgtttgttcggctccgattggaccttttacggcgtgtccggctcctccggctccaaccgtatcgtcgcccaagcagccgttggcgcagacgaaattgccatcattgatcgtaactgtcacaagtccctgaaccacggcttgaccctctctcaggcacgaccagtgtacttgaaacctacccgcaacgcctggggcttgatcggcccaattcccaccggccgtctgaagaaagcatccatcgatgcattggttgccaactctcgactggctagcggtgcggtgtctcagagcccatcctacgcagtggtcaccaattgcacctacgatggcttctgttataacgtgaatgatgtggtgcgtcacttgggcgagtccgcaccacgtatccacttcgacgaagcctggtacgcttatgcgcgatttcacccattgtaccaatctcgctatgcaatggatgccgaagaaaccccaaaccgtcctaccttgttcgctgtgcagtccacccacaagatgttgccatccttgtctatggcatctatgatccatgtgaagaagtccgaccgtgcacctctgaacttcgatgactttaatgatgcctttatgatgcacggcaccacctctccgtactatcccatcattgctagcatcgatgttgcagtgtccatgatggagggtgaatccggatactctttggtccaggagtctatcgaagaggcaattgcattccgtaaggcagtggtgtccgtgaaacgtcagttgcaagagcaggaaggcggcgatgcctggttctttgatgtgctgcaaccgaccgaagtccaggactctgatagcggccagcgttactcattcgaagaggctccagtgtccttgctgtcacactcggcggactgctggtccttgcgttcaggcgagcgatggcatggttttgccgatgacgatcttgttgaaaccaactccatgttggacccagtcaaggttaccttgacttgtccaggcatcggtcctaagggcgagtaccagaagaacggcatcccaggctacttgttgacccgtttcttggatgatcgtcgaatcgaaattgctcgtaccggcgattacactgttttgatcttgttctccgtgggtattaccaagggcaagtggggcaccttgatcgaatccttgctggcttttaagaaacactacgacaacgacgatctggctaccgatgcgatcccgtcccttaaggcgcactccccacactatgacacccttactctcaaggagctgtgccaaatcatgcacgaaaagatggatgagttggaactgatgtcccatattaacgacgcagtcaataccgatccagagcctgttatgaccccagctgaagcgtaccagaaggtggtccgttataaaaccgaacacatccgattggacgatttctccggccgtattgctgcgtccatgcttgtgccatacccacctggtatcccggtcctcatgccaggcgagcgaatgcctcagggtaacaagggaatcattggctacttgcgtgcattgcaggagttcgacaaacagttcccaggctttgagcacgaaatccaaggtgtgaacgtggatgaaaatggcgatttctgggtgcgtgcgatcgtggaagaggaacgtgatggacagtccttgccaggccatatcacctttaagcgacaagtgtccggcatcaagaagggccgtcag

SEQ ID NO: 328 - DNA, 1425 bp, Dethiosulfatibacter aminovorans
atgaaattgggcgaagaactgaagaaatatagagaagcaggaacggcgcgctttcacatgcctggtcacaaaggcatttcatcatgcctggaagaagttttcgtgcttggtaatgatgttacggaagtggatggcctggataaccttcataaaccaaccggcgttattaaagatctgcttgaagacatcagtggcgtgtatggaagctacaaaacactgatttctacgaatggctcaacatcatcactgcaatcagcaattcttggtgtgacaaaaccgggcgattcaatccttgttgacagaaattgccataagagcgtgtataacgcgatgattttaggcgatttgaaccctgtctacttaatgccaaaatgtgatgaagagtcaggcttgagctggatcgaagatctggctggactggaagagagcattcgggccgatgagaaaattaaagcagttgtgctgacatatcctacgtactttggaatttgctgtgatatggagaaaattgccgagacagtccatcgttatgatcggattttaatcgtagacgaagcacatggctctcatctgcgtttttgcgatagtttaccatgttcggcgttggatgctggagccgacattgtcgtacaatcaacacacaaaactcttccgtctttaacgcaatcatcactgttgcatattcgggatgaaaaacacgtcgagggcgtatcagacatgatcagcatgctcctgacatcaagcccgagctatctgatgatggcttctattgaagcatcagttgatctgatggaccgagaaggctcatcaagactgaaagcaaatatggattgcgtagacaagatggcggatcgttatgaaaacgctggtcggatttttagaaaacgcgattacttcatcaagagaggcgttcatgactttgatgacactcgcctgctgtttaaaacatctgaaattggcgtggatggcggcagagcagaatcaatccttaggaaagagtataatgtccaagtagaaatggccgatactaattacgttaacgcgtttatgacagcgtgtgatggagcttatgacattgaaagactgtttgcagcggttaacgatatggtgcttaaatacggtatgacggcggatgacgagaaaacaggctcagaagatgaagcatcaatgccgtgcacaatggaatgtcctgagatggccatgaacatgcgtaaagcattttacagtgagaaaacatcggtcgatattatcgacgctgtaggtgaaatttgcgggtgtcatatcactccgtatccgccgggcattccgttgctctgtccgggcgagaaaattacgggacagcttgtcgaaagaattattaaaatttcaaaatcaggaatcgaagtaatgggcctggaagaaggcaaaattaaaattatcaaaatc

SEQ ID NO: 329 - DNA, 1383 bp, Salmonella enterica
atgaatgcgaaagtcattaacatgacaagaacaacgccggttattaacaaaatgcaagccatgcatgatcgcaacatttttagctttcacgcactgccggtttcaagctatggcgaatcagatgttgtgggcgatgccagaaatgaaattctcgcatacccagaatcatcagcgacaggtgaactttttgataactttttctttccgtccggcgttatttgcgaaagtcaaaaactgaccgctggcatctatggaagcgattcatcattttacatcacaggcggaacatctacggctaaccaaatttcaatttcagccctctacgataaaggcgacagaattttagtggataggaactgtcatcaaagcgttcattttcacgtgcagtcaatcggtgcggagacccactatctgtgcccggatctgcgtactgaagacggggagatttgtgcttggagctacaatcatttggaacaaacgctgcttaatctgcagcggagcggcaaagcatgcgatattgtcatcctgacagcccagtcttatgaaggcattatctacgacattcctggagttcttacacggttattgtctgcgggcgtgtgtacgagaagatttttcatcgatgaagcatggggatcaatgaactacttcagcgaagacacacaatctttaacggccatgaacattgaaccgctgctggataaataccctgatttggacgtcgtatgcacacattctgcacacaaatccttattttgcttgcgacaggcatccattatccattgtaggggcacagcgactttatctgaaagaattgagacggctaaatatcgcatccataccactagcccaaattacccgattatcgcatcactggatgcttcgcaagccatgatggcatcacatggcaagaaactggcgaaccacgctcgtatgcttgttcggaaattcgttgccggagtgtcaagcctgaaatattttggtgaaaaggcaatttgccaggggatttttagctcacattggcacatctattacgatccgacgaaagtcatgcttgacgtttcatcactgggtaatggcaaagatattaagaaactgctctgtaacgagaacatctatgttaagcgctttattaacaacgtgctgctgtttaatttccatatcggcatcaacgaacaagcagtctcaagcctgcttcaggcgcttaattcaattagccaagagatctataagcaggatcgtagcaaggcagaagtatcttccaaattcattatcccgtacccgcctggcgtccctttagtatttccgggcgaaattatcgatgacgagattcgtaacaaaatccatgaataccgcaaaaatggatttctgatcatcgcagcg

SEQ ID NO: 330 - DNA, 1821 bp, Unknown
  Description of Unknown: Candidate division TA06 bacterium 34_109 sequence
atgaatctgattaattacgatctgatcgttgtgacagatgacaagaaaaagaaagcaaagtacaattttctgaacggcgaagaagttctgtttaatcatacccgctttcgcattcgactgattaataagtttatctatagcgaaactggtcttgatcggttaatgtacgacggcgttattgtagatgttaagcaattcgaagatgacattatcaatacgctgctgttttataacaaccagtcagaaatttttatcttcgactacaaattcaaaccgaacatcgctaacagaaacaccaagtacttctacgaattgagccatctgaaggatctgatcatccaatttttctatgaaagacgctacaatacgccgtttttcaacgctcttaaaagattagccagatcaaagaaacagagatggcatacacctggccacgtaggcggagaagcctttgagaaatatacgtctgttcgcgatttcaagcgtttctacaagaacaacatttttctgaccgacacttcagtttcagatccgtcatttggctcactgttgagtcataattcggtttttaaagaagcagagaaactgctgagcacagcctatggcacgctttactcttttattaacgttcatggcacatcaacaagcaacaaaatcatttttatgacacttttagataagggcgacaaagtgattgtcgatcgtaatatccataaatctacgattcactccattatcgtcagtggtgcattgcctatttttctgaaggcgaacttcaaccgggaatttgggattatcttaccaacacggaaagaagaagttttgcgatgcatcgaagagaacaaagacgctaaattgctcgcccttacagttccgacgtatgatggtctgaggtacaaccttccggaaatcatctcattagcacatagatacaaaatcaaagtattggttgatgaagcatggggcgcacacatgcactttcatcacgattattacccggacgcattacaatccggcgcggattacgtcgtacaatcaacacataaagttatgggagcattttcacaagcgagcgtaattcacgttaacgataaggacttcaaggaaaagaaatatgaatttttcgagaactacatgtttttctcatcaacatcccctttttatccaattgtggcatcgatcgatgtctcacgcaaactgctttcatgtgaaggaaaaatgattctggaaaaggttaagaaatattacgaacaactggtcagcgagatcgatgcgcttaatgactttaaggtgcttaaacggtcttatctgaaggattactaccaggacaagaacgaaatcttattggattacacaagaattttagtcaacttttcgaaagcaggtatcggcaagaaacaaatctatagttatctgctgaaaaacaaaatcgttgtggagaaaattaattacaactcttttacacttctcttgggcgttggaacaacgcagaacatggtaaaacgcctgattaaagttttgaaggacttcaagtacgaaaaacgtgatctggaagaaaaatcaatccagtttatttggaacgatttggaagctacaatcccgcctttcgaagcatatcagtctaagggtgaatggattgaactgaaaaatgcgaaagggcgtatctcttccaacatgctggtgccgtatccgccgggcattccgcttattatccctggacagatttttacagaagacttaattaataatctgctggaaatcacatcatttgatgaaatcgagattcatggcctgattaaaggcaaagtgaaagtccttaaa

SEQ ID NO: 331 - DNA, 1179 bp, Selenomonas ruminantium
atgaagaacttccgtttgtcggaaaaagaggtgaagaccctggcgaaacgaatcccaaccccattcttggtcgcatccctggataaggttgaagagaactaccagttcatgcgtcgtcacttgccacgtgcaggcgtgttctacgccatgaaggctaatccgaccccagaaattttgtctttgttggctggcttgggctcccacttcgatgtcgcctctgctggtgaaatggagatccttcatgaattgggcgtggatggttcccaaatgatctacgccaacccagtcaaagacgctcgtggcttgaaggcagccgctgattataatgtccgtcgtttcacctttgatgacccatccgaaatcgacaaaatggcgaaggcagttcctggtgctgatgtgctggtccgcattgcagtgcgtaacaacaaggcattggtggatttgaacaccaagttcggcgcgccagtcgaagaagcattggatttgttgaaggcggcacaggatgcgggcttgcacgcaatgggcatctgcttccatgttggctcccagtccttgtccaccgccgcatacgaagaagcattgttggtggcacgtcgtttgttcgatgaagcagaagagatgggtatgcaccttaccgatttggacatcggcggcggcttcccagtccctgactgcaaaggccttaacgtggatttggcggcaatgatggaagcaatcaacaagcagattgaccgcctgttcccagataccgctgtgtggactgagccaggccgttacatgtgcggcaccgcggtcaacttggttacctctgtgatcggcaccaaaacccgtggcgaacaaccgtggtacatcctggacgagggaatctacggctgtttcagcggtattatgtacgatcactggtgctatcccttgcattgtttcggcaagggaaacaagaagccatccacctttggcggtccctcatgcgacggcatcgatgttctgtaccgtgacttcatggccccagaacttaaaattggcgataaggttctcgtgaccgagatgggctcctacacctctgtgtctgccactcgtttcaacggcttttatcttgctccgaccatcatttttgaagatcagcccgagtacgccgctcgactgactgaagatgacgatgtgaagaaaaaggcggcagtc

SEQ ID NO: 332 - DNA, 2310 bp, Erwinia pyrifoliae
atgcttgatttcaacttgacttttgctggcaccgtgtcctgccttgcattgttcgtctccgtttctttgctgccaggctacccttatgtcgcagcccgtcgtcgtgtttggattcgtcagaactccttggaaaacgtcatgaatatcattgcaattatgggtccacaccatgttttctacaaggatgaaccagtgcgtgagttggacgtggcactgaaacgtcaaggctttcacaccgtgcacccacagggtgccgaagatttgttgaagttggtcgagcacaacccacgtatctgcggcgtggtcttcgattgggacgaatactctttggacctgtgtagcgaaatcaaccagctgaatgagtaccttccactctatgctttcattaacactgactccactatggatgtgggtgtcaatgaaatgcgtatggctatctggttctttgagtacgcgctgaacgcaggcgaagagatcgcgcaacgtatccgtcagtacaccgacgaatatatcgatactattaccccacctcttaccaaggcattgttcaactacgtgaaggaaggcaagaccactttttgcaccccaggccacatggctggcaccgctttccagaagtcccctgtcggctccttgttctacgatttctttggcgcgaacaccctgaaagcagacatctccatctccgtgtccgaattgggctccttgttggatcacaccggcccacacttggaagccgaagagtacatcgctcgtactttcggtgcggagcagagctatatggtcaccaacggcacctctaccgctaacaagatcgttggcatgtacgctgcggcagccggctccaccgtgttgattgatcgaaactgtcacaagtccttgacccacttgttgatgatgtccgacatcattccagtgtggttgaaacctaccagaaatgcgttgggcatcctgggcggtattccaaagcgtgagttcaccaaagagtccatcgccttgaaggttgctcaaaccccgcgtgcatcctggcctctgcacgccgtgatcaccaactccacctacgatggcttgctgtacaatactcagtatatcaaagaaaccttggaagtgccatcaattcacttcgactcggcatgggtcccatacaccaactttcatcctatctatcgtggcttgtccggcatgtctggtgaacgcaccccaggcaaggtcatctacgaaacccaatccacccacaaacttctcgctgcattctcccaggcatccttgatccacattaagggcgattacgacgaacagacctttaacgaggcgtatatgatgcacaccactacctctccaaattacgcgatcgtcgcaagcattgaaaccgcagccgctatgttgcgtggcaactccggcaagagattgatcaaccgttccgtggaacgagcacttcacttccgtcgtgaagtgcagagactgcgtgaagagtccgacggttggttctttgacatctggcaaccggacggcgtggaagaaccagaatgctgggccattcagccaggcgatgaagagtggcacggcttccgtgatgcggacgcagatcacatgtaccttgacccaatcaaggttactattctcacccctggcatgtccgaaatgggcgagatggcagaagagggcatcccggcggcacttgtcgccaagttcttggatgaacgtggcgttgtggtcgagaaaaccggtccctacaacttgttgttcttgttctccatcggtattgacaagactaaagctatgtcagttcttcgtggcttgaccgagttcaagcgagcgtatgatttgaacctgcgcgtgaagaacatgttgccggacctgtacgcagaggaccccgatttttatcgaaacatgcgcatccaaaccttggcccagggcatccactcccttattcgccaacatgatttgccaagacttatgctccaggccttcgctatgttgccagaaatgaagctgacccctcaccaaatgtttcagcaacaggtgaagggtaacgtcgaaaccgttgacatctcccagctgattggccgtgtctctgcaaatatgatcctgccctacccaccaggcgtgccacttgtcatgccaggcgaaatgattaccgccgagtcccgtccattgttggatttcttgctgatgttgtgtaccatcggccgtcactaccctggctttgaaaccgacatccacggcgctaagctgaccgaggtcggacaatatttggttcgtgtgctgaaacacgatggcgaagttcaggccgctggtaacgcggttgtg

SEQ ID NO: 333 - DNA, 2124 bp, Haemophilus somnus
atgaaacaaattcttatcggctattccatgtacaatgatcatctgcaaaacctgatttctgcattagaagagaaaggctataagacaacggcggtcgatggacatcaagaaatcctgcacgcggttaaaaataacgcttctatcatctccgtgatcctcagcaacgatattatcgataaggacttgacagacaagattctgcttttaaacgaagatctgccgatcttttcactgaaagacaccgatgacttgaatgagaatctggattttgccactattggccatcacgttcagttcgtggattgcaacctttacacattagacgaaatcatccataagattgaacgagcagtcgagaagtactttgatagcatcacaccgcctctgacgaaagcactgtttaagtacgtaaacgaggataagtacaccttttgtacaccgggccacatgggcggcacagcatttttacgctcacctatcggctcagtgttttatgatttctttgggaagaacacattcaagtctgatatttcagtttcagttggcgaactgggctcactgctggatcattccggcccgcacaaagaagccgagaagtatattgcaaatgtctttaacgcggatagatcttacatcgtaacgaatggcacatcaacagctaacaaaattgttggcatgtatagcgccccttcaggaagcacagtgctgattgatcgtaattgccataaatcactgacgcatctgctgatgatgagcgacgtgacacctatctatctgaaaccaacgcggaacgcgtacggcttactgggcggcattccggaacaagaattttctaaatccgctatcgagaaaaaactggccgatattgacaatcctaactggccagtccatgcggtaatcacaaatagcacgtatgatggattattttacaacaccgacaagatcaaggaaacactggatgttaaatcaatccatttcgactcggcttgggtgccgtataccaacttcaaccctatctacgaaggaaagactgggatgggcggaaagcgtgttgaagataagatcatctacgaaacacaatcaacacataaactgctggcagcgttcagtcaagcatcaatgattcatatcaaaggccagatcaatgaagaaacatttaacgaagcctatatgatgcatacatcaacatcaccgcattacggtattgtctcaagcacagaagtagctgccgcaatgatgaagaacaacacaggaaagcaacttctccaggatgccattacgcgcgcagttagattccgcaaagaaatcaagcaacgtatgcgggagtcacagagctggtattttgatgtgtggcaaccggaaaatatttcatcaacagaatgctgggaactgaaacctggcgagagctggcatggattcacgaacatcgataagcatcacatgtatttagacccgatcaaggtgacattgctcatgcctggactgaataaagataacacacttgacccgaatggtattcctgctacgcttgtctcaaactatttagatagcaagggtatcatcgtcgaaaagacaggcccgtacaatatcctggttctgttttcaattggaatcgatgacacgaaagcaatgagcttaattcaagcgttggatgactttaaatctctttatgatgccaatgtcttggtaaaagacattctccctaacatctatgcgcatgctccaaaattttacgaaacaatgcgcattcaagaactggcaggcggcattcatcgcttgatctgcaaacacaatttgccggatctcatgtttaaagcatttgacattctgccaaagatgatcatgacgccgaataaagcctttaacttagaattgaagggcaacattgatgaatgttatgttgaggacatggtgggaaaaattaatgcaaacatgatcctgccgtatccgccgggcgttccgcttattatgccgggagaaatgatcacagaagagtcaagagcaattctggaatttcttgtaatgctctgtgagatcggcacacattatccgggctttgaaacagatattcatggcgcttatcgacaggatgacggcagatataaagtgaagattatcaatatt

SEQ ID NO: 334 - DNA, 7470 bp, Plasmodium malariae
atgaactccgtcaacgactccatgtattctggcgataccaactccctccacgtgaactccttgtacgaaaacaatcctgataagtccgtgaagaacatcaacgctgtcaacgactacattacctcttctaacgcgatgtccgaagaggcagaaaccgcagccggcaacgatgagctgatcccaaactcctcctccaaccacattcattcccagtacaagcaccgtcatcagtataaacaataccaccagtataacccacacaaccaacataagcagcaccatcaatacaagaaattgcacccgtacaaacagtatcatcaagaaaaggagcttcccaaatatcaaccgctcccccagtaccaacactctacccagtatcaaggctccaagcctcactctcagagccaactgcatgacggcggcaagaagcgtcgtgaaaagggtaaagttgagcgaaacaagtacgataagatcgaagagttggaaaagtacatcaacattaacaatgcgaccaacgtgtgctcccttcgtatcaagttgtgggaagcacttatgctctacgttaacaacttgaaaatcgagctggtgtacttcatcatctactgtctggaagagattgaagtgtactggggcgaagaggcaaccgacaacttgcgtgacatcatcaacttgatcaacgataagaaatacaaggaagtgctgaacaaaattggcgaaaccttgtcctctctgtccgtcaccactggcaagaccactgaagagaacccattcttttacaccttgatcgtgtccggccgtcgtgacgaaaacaataataataacaacaacaactccaacaataactacaactacaacaacaacaactctgatcttggttgcgaattgaacaagatcttgcactatgagcataatcgtcttagcaaccagtcaaacaacaagaaattggaatacaagatcattgaggcttccaacgcgaaagaagcattgctggcctgtctgattaaccctcaaatcctgtccgtggtgttggtggataacttgaccatcgatgaagagaaagttaaagaacgtgactactataagttcaacgaggataacatgttgaatgctaactgcgcaaactcctcctacttgttgaattgtaaccttcagaataacacccaaatggtcatgaagaacccgttgaatcacaacggcatgatgcattccggcggcgtgaccactgttcagaactccaaggatgttttgctgatcggtaactccatgttgcccgaatacctgaacaacaacaacgtcaacatcaacgaaaactccaacgttcgttccttgcgttccttgtacatcaagcgtaactacaagttcgacattggcgatttcgtcatcggatacgaacaactggtttccgcgccacttgagaagatgaagaaaggcttcaacatcttggtcatcctgattaaatccatcgcatacattcgttcctccgtggacatcttctgcgtgtgtacctctattaccttggataagttgcacagcgtgaataacaaaatcattcgaatcttcaccactcacgatgaccattcggatttgcacgaatccatcttggatggcgtcaagaaaaagattaagaccccattctttaacgcactgaaagcatacgccgagcgacctatcggcgttttccacgctttggcaatctccaagggtaactccgtgcgtcgatctcgctggattcagtccttgttggatttttacggcgtcaacttgttcaaggccgaatcctccgctacctgcggcggcttggatagcttgttggacccacacggctccttgaaggaagcacaaatcatggctgcgcgcgcatacggctccaaatattgtttctttgtgaccaacggcacctcttcttccaacaagatcgtcatgcaggccttggttaaacctggcgacatcattctggttgatcgtgcttgccacaagtcccaccattacggtttcgtgctttctcaggcattgccatgttacttggacccatatccagtgtcccgttacggcatctatggtgctgttcctatctatgtgatcaagaagtccttgttggattaccgtaactccaacaagttgcacctggttaaattgctgatcctgaccaactgcactttcgatggcattgtgtacaacgtcaagcgcatcattgaagagtgtttggcgattaaaccggacttgatcttcctgtttgatgaagcatggtttgcatacgcctgcttccaccccatcctgaagttccgtaccgcgatgactgtcgcagaaaagatgagatccaaggagcagaaacgtatctactataaggttcacaagaagttgttgaagaagttcggcaacgttaaatctctgaaccaggtgtccgccgataagttgctgaaaacccgattgtacccgaacccctccgaatacaagatccgcgtgtatgctacccagtctattcacaaatctcttacctctttgcgtcaaggctccgtgatcttgatctccgatgacaactttgaatcccatgcctataccccattcaaggaagcatactatactcacatgtctacctctcccaactaccagatcttggcgaccctggatgcaggccgtgcccaaatggaactggagggttacggcttggtggaaaagcagaccgaggcagcattcttgatccgaaaagaattgtcagaagatccaatgatttcccgttactttcgaatcctgaacgccgaagaccttatccccgattccctccgacaatgcgctgtttcttacatgaagcgcaaaaagaaaatcattaaagagtacgattcctccgattcccgttgctcggccaacgtgacctactcctgtgtctctaataacaatacccgtggcatcgtggacccatccgattctggcaagtactatctgagcggtgaacagaacgttgtgcactccgtgaacgcatcctccttcgagtgcgtccgtggcaccaacggcgcaaccaactccaaccacaccaacaatagcaccacctctaacaatcgagccaactccccggctcgcaactgccacgtgaagtcccccacctctaactaccataccaacaattgtccgacctctatccacattggcacctctgtgatgctgtcaaataccaactccaacaatatcgttcagggcaacaataacaataacgtgaagtcctctaataactctccccgtagcgcattgaacggagtggctgcgaagtccaccgaaatcgttgagtcatacacctcttgcaacatctactccgaagactctgattaccagaaggtgtccaagtccggtaacatcaagagatacatcaagaagaagaagaaccaaaactgccgtgaggcgccgtgtgtctcctacgatggctccaacttctcaggtgcaaactccgaaaactgcgagaattgtgaaaactccaagaagtcccgtaactcccgtaactcccagaactcccgtaactcccgtaactcccagaactctcagaactccgaaaatgagaacttgtccttcttggaaaactccaacaacaagcgttacaacaactcctacggctactcctccggcctgaaaaactttcttgagtacttcgaatgctcatggctttcggaagacgagtttgtgttggacccaacccgaatcaccttgttcaccggttattccggaattgatggcgaaaccttcaaggttaaatggctgatggacaagtacggcatccagattaacaaaacctctatcaactctgtgttgttccaaaccaacattggcaccactggctcctcctgcttgttcttgaagtcctgtttgtccttgatctcccaggaacttgatcagaagaagtccttgttcaacgaacgtgacttgaaccagttcaacgagaacgtgttcaacttggtgtccaactatatcgatttgtccgagttctctgaatttcacccactgtttaagaaacgatacaccgaccctaagatcttcaacaaagaaggcgatattcgcaaggcgttttacctggcatacgaagaagattacgtcgagtatatccttctctccgatttgaaggaacgtattcgacagaacgagatgatcgtttcggcatcctttatcattccgtacccacctggcttcccagttttggtgcctggtcagattgtttcccaagaaatcgtggattacttgagcggcttgtccgtgaaggaaatccacggctatgacgagaacattggcttccgttgcttttacaacttcgtgctggagtacttctataacatggtcatctccgacccctactctttgtaccagaagattgataaggaaacctacgaaaagttgaagcacatgtctctgagcaagcgtaagtccttggaatccgtgtgctacctttatatctacgataacgagtccaacaagatgaagaaagtgtacctgtgcagcggcaacgtgtccaccgaaaataacaccatcgtctccgacacctgtgatgagattactcagaaccacgcccgtcgttcctataacaagaaaggcaagcagacctctatctacgaaaacttctccaagtccgctcaaaacgcgggtaatgcatctggcgttggtaacgtgagcggcaagatcggtaacatcatctacggcgataactttaataactgcgctaacggcaaggacatttgtcaccacttgtacggcaaggaagaagaaggcttcttcgacgtgaacgatgaaaatgccttcggcaacgatgtccttcacttgaaccattacgcaatcaagaacccattgaagaagggcaccactgaaaccttcatcaagaagacctgcaaccagaagtcctcctggaaggagaaaatcaccgataaataccacggcaccccaaacggcacccgtcgagacaagcacaacgtgttgtcctccaagaagaaggaaaacggtcgtaagtgtaaaggcatccaggttaacaacaataataataataacaacgtgatcctgattaactccgaatcttacgaccacgatcaaaaggtcatcgacttggtcgataccccagagaagtccaacaagaactacgagtgtcacgaacatgacggcagagataacgatgacgatgacgatcgtcattccggcggcggctccaattataaccgtgactcctctaataactcccacaacgtggatcgcaagagatacgtcgttggcaccgacaaacactccggctcctccaacacccataatgtgggcaccgataagcactccggcggctccaacacccacaacgtcggtatcgacaaacattccggcggctccaatacccataatgttggcattgacaaacactccggcggctccaatactcataatgtgggcaccgacaagcattccggcggctccaacccacacaatgtcggcaccgataagcacagccattcaggctcctccaataacaacaagcgctccctggaacgtaagaagaagcgtaacgagggcaattacatgtcgttgtcctataaggcaaacatctacggacacaaagtggtcttcaaccgcggcaacaataacaatgacgatgccaacgttaaggcttataacgaaaaggacggcaagggcggcgaacgtaacaataactgcaccttctacgataagaatgtgaacggtatgaaccgtgaacgatccctgaaaaacatctcgtacatgtccaacatctctgagattcgtggcatgaataacgtcaataacgttcgtcgtaagaaccgaatcgacgaaggcaagaaccgcaacattaaaggcaccgacgatagcgattacttgctgtccgaagtgaccgcgaatatgtccaagaacatcggcccaatttctgacatctacagcttgaagaagatctccaagttgaaccgaagcgacgatggtaaatatgaaaactctctgagcgattacgtgcctaagttgaagtcctccaacatcgtcatctacaacaaggttaagaaaaacgcattgttgatgggtcgtaagcacatgtcagatggcaagtcccgtaataaccaccatcgtaagaactcccacatgaaccagaagtctaacaaggactatgtttactattccgattcctccaagaagatcaacgaaatcatctacatgaagcgtcaagacggcgatctgaccgaggaaaacgccattgtgaaggaaaacttgaacgaattgaactccaacttgttctactccaacggcaccggcaacaagggcggcgacatcaagggtccagaaaagaactcctccaataactccggcaccttgtctggcaccaataacggaaataactccaactcctccatccagaacttcgcgaatgttaacgagaaggcaggcggtatcacctttaccaccccaaacattgtggccgacgaatactgcgataagaaagagatccctattaagcgtggcaataactccggtgacaataacggcttgaactccggcttgaactccggttacaactcgggacacaatggcgtgcataactcctgtaatgattcctccaacaagccaatcattaacgaaggcaccggatacaataacagctatcactcagaccaggatgctaacaagagcaatgaggaaaagtacaaatccaacggcctgatcagacctaataaccttgaacgtaacatcattctcggtaacgaaatcattgtcgagaaggacaataacttgtcttaccgaaacatcagcggccacaacttgaacgaaaccaactcctatgtttacgccaacgatggcaccattgctgagggtcactacggaaataacaatatggcacgtggctccaacattggctgctccgacgacatcgagggctccgaagacattgaaggcggcgaagacatcgaaggcggcgaagacattgagggcggtgaagacatcgaaggcggcgaagacattgaaggcggcgaagacatcgagggcggtgacgatattgaaggctcctataacatccgttcctcctccaacatctacatgggcaactccaacgccatctctgatgtggctcaggtgtccggctccgtgaacgacgcgaatatctccaacctgatgggtcacgttaaggacgaaattggcttttgcggtaaaaacttcttgtactccgaaaacgagctgaagatgaacgcattgctgagagaggaagagaaggataaatccaccatccgtaacttgaacactctgaacaacaactcttacatcaacaacttgatcaccaacgtggatgatgacaccttcatccacaaggaaggcaacttctttctggagtgcacccttaccaactccgaaatgaattgctcctccttcgagatggatatgtccctgaataacatctatccaaacggcggcgaacacgtgaagcagcatcgtaaatacgatgacgatttgaagaaagagttc

SEQ ID NO: 335 - DNA, 1422 bp, Garciella nitratireducens
atgtctctcatcgaaggcctgaacaaaattcttcaagagaacctgacacgtcttcacatgccgggacacaagggacggaagatcttccctgaaatcctgaaaaataacttgcaagaaatcgatattacggagattccgggctcagacaatctgcatcacgcgcaggaaattctgctggaagctcaacagcgtgcagcgaaggtctttggcgcacagaaaacatattttctgattaatggtacaacggtaggcattcaagcgatgattttagctacttgccggccgggagataaactgttggttcctcgtaactgtcatcggtcggtgttttcagcattaatcttgggcgatattatcccggtttatctgagcccgatttcacatccgaaaacaggaatcgaccttagcatttctgtggaagagattgaaaagaaactgaagcaacatccagatgttaaaggcgcggtgttgacctaccctacttattacggctcatgcagtgacattgagaaaattgctaagatccttcatcacaaaaagaaattcctcctggtggatgaagcacatggcgcacatctggctctgcataaaaatcttccgttaagcgccttacaggctggggccgatattgttgtggacagcacacataaaattctgagcagctttacacaatctgcaatgttgcacattggtaaccagtatctgtccacagaaaaagttgaactgtttctggggatgctgcaatcatcatcacctagctaccttttaatggcgtcccttgattgggccagtcaacaggcagaagagatgggccaaattaaatgggagaaaattatccaatggacacatcaggcaagagaagacatcaggcatcacacgaatatgaagccgattggcaacgaaattatcggacgttatcatgtcgtagattacgacccttctaaattgctcattgatgtttcatcaacaggtttgacggggatcgaaacggagaaaattctgagagaaaaatatcgcatccaagtagaactgagcgattattaccatattttagccatgaccggtatgggcacaatcgaacaagacattcagcgctttacacaggcaatgatcgatattgaccataagtacggtaaccctcacaagaaactgacatcactgccaattagaatccgcgaaggcgagatgggactttcaccgagaaaagccatctatgcaccgtcagagaaaattctgcttaaaaacgcgcagggacgcatgagcaaagagtttattatcccgtacccgcctggtatccctatggtcctgccgggcgaagtaattacacaagagattatcgaagagattgaaatcatgcagcgctggggcggcacaattatcggcctggaagataatactttacaaaacatccaggttattaaa

SEQ ID NO: 336 - DNA, 2355 bp, Betaproteobacteria bacterium MOLA814
atgcgtcaggttccatgcggccacacccttgtgttctacactgagtggttggtgcgttccttgttggataccaacatgaagttccgttttcctatcgtcatcattgatgaggacttccgatccgaaaatacctctggcttgggcatccgtgcattggcacaagccatcgaatctgagggcgttgaagtgctgggtgtgacctcttacggcgatttgtcccagttcgcacagcaacagtctcgtgctagcgcgtttatcctgagcattgatgacgaagaggtcacccagggtccggatattgaccccgcagttgagcgcttgcgtggcttcatcgaagtggtccgtcgaaagaacgccgatgtgccgatctacgtccacggtgaaaccaaaacctctcgacacatccccaacgatgtgcttcgagaattgcacggcttcatccacatgtttgaggacaccccagagttcgtcgctcgccacatcattagagaggcgaagtcttacctggaaggcatccaaccacctttctttaaggcattgttggattacgccgaggatggttcctattcttggcactgcccaggccattctggcggtgttgcattcttgaagtcccccgtgggccaaatgtttcaccagttctttggtgaaaacatgctccgtgctgatgtttgtaatgcggtggaagaattgggccagttgctggaccacaccggcccaattgctgaatccgagcgtaacgcagcccgaatcttcaacgcggatcattgcttctttgtgaccaacggcacctctacctctaacaagatggtttggcaccataccgtggcccccggcgacgttgtggtggttgatcgtaactgtcacaagtccgtgctgcatgctatcattatgaccggcgcgatcccagtcttccttaaacctacccgtaaccactacggtatcattggcccaattgctcaatctgaatttgagcccgaaaccattcgcgagaagatcagaaacaacccattgctcaaagattatgacgcggataccgtcgaacctcgtgttttgaccctgactcagtccacctacgatggcgtcctgtataacaccgaaaccatcaagggaatgttggatggctacgttaccaacttgcacttcgacgaagcctggcttccgcacgctgcgttccatcccttttacggcacctatcacgcaatgggcaagaaccgtgagcgaccagaacacgccgtggtctatgttacccaatccttgcataaattgctggcaggcatctcccaggcatcccacgtcctggttcaggactctaagaccgtgaaattggatactcacctgttcaacgaagcatacttgatgcatacctctacctctccacagtatgctatcattgcgagctgcgatgttgcagccgctatgatggagccgcccgcaggcaccgccttggtggaagagtcaatcttggaatgtctggacttccgtcgtgcaatgcgtaaggtcgcgaaagactacggaaaccaggattggtggtttaaggtctggggtccaaaagttaatgaactttccgatgacaccgacgagggtatcggagaacccgctgattgggtgttgggcatgggcaaggacaacaattggcacggattcggcgatttggctgatggttttaacatgttggacccaatcaaggcgaccatcgtgaccccaggcttggatgtcgatggcaccttcgcagaaaccggcattccagcctcgatcgtgaccaagtttcttgcggagcacggcgttgtggtcgaaaagaccggtttgtactccttctttatcatgttcaccatcggtattactaagggccgttggaacacccttctcactgcactgcaacagttcaaagatgactacgatcgaaaccaaccaatgtggaagatcttgcctgagttctccaaagccaacaagaagtatgaacgtatgggccttcgtgatttgtcgcagcacttgcacgctatgtacgcgaagcacgacatcgcacgtgtcaccactgacatgtatttgtccgatcacaccccagcaatgaccccaggcgatgcattcgcccatattgcccgtcgaaccactgagcgcgttccaatcgatgacttgctgggcagaattaccacctctttgatcaccccttacccaccaggcatcccacttttggtgccaggcgaagtgttcaaccaacgtattgtggattatttgaagttctcccgtgaattgtcagcacagtgcccaggtttcgaaaccgacatccacggcatcgtcggtatcttggatgactccggcgttaaacgcttctttgcagattgtgtgagagccacc

SEQ ID NO: 337 - DNA, 5970 bp, Plasmodium gallinaceum
atgaagatcgttttgatcaagaagatcaagaacattaacgcgatcaacgattacatcaacaataacgcaatgtcggaagagattgaatcctccaactccaaccaggatttgtcctcctccaacccattgaacctggcccgtcgaaacaagaaggaaaagatcaagttggaaaagaacaagtacgataagatctacgaattggagaagtatatcaacatcaacaacgccaccaacgtgtcctctcttcgtatcaagttgtgggaagcattgttgctttacatcaacaacttgaacatcgagctggtgtatttcatcatttcctgcctggaaaagatcgaggtctactggggccaggaagcaaccgataacttgcaggaaatcatcaacttgatcaacgacaagaaatacaaggatgtgtctaacaaaatcggcgaaaccttgtcctccttgtccgtgaccactggcaagaccgcggaggacaaccctttcttttacactttgatcgtctccgcaaagcgcgacgaaaactcccacaattacaactcagatcttgcctgcgaattgaacaagatcttgcagtatgagcataaccgtctgtctaaccaaaacaataacaagaagttggaatacaagatcattgaagtgtccaacgcagaagaagcattgttggcttgtctgattaactctcagatcttgtccgtggtccttgtggacaacttgaccatcgatgaagagaactccaaagaaaaggagtacttcaactttaccgaagaaaactccctgaacaataactgcgcaaataactcataccttaattgtaacggcaccaataacactaacaagacctctttgactcactcgatgcataacggctctacctctaataacaaggatgtgcgtaatatccagaactaccgaaacaactccaacaacaacatgaacgaaaacaagaaagtgaacggtttcattaaaaacgactacaagttctacatcaaagatttcgtcctgggttacgaacaacttgttcacgccccagtggagaagatgaagaagggcttcaactctttggtcatcctgattaaaagcattgcttacatccgttcctccatcgacatcttctgcgtttgtacctctatcaccttggataagttgcagtccgtgaacaatatgatcattcgcattttcaccactcacgatgaccattcggatttgcacgaatccattttggatggcgtcaagaaaaagatcaagaccccattctttaacgccctgaaatcctacgctgagcgtcctattggagtcttccatgcattggccatctccaagggcaactccgtgcgtcgttcccgttggattcagtccttgttggatttttacggcgttaacctgttcaaggcggaatcctccgcaacctgcggcggtttggactcattgttggacccacacggctccttgaaggaagcacaacttatggcagcccgtgcatacggttccaaatattgtttctttgtgaccaacggcacctcttcttccaacaagatcgttatgcaggcccttgtgaaaccaggcgacatcattttggttgatcgagcttgccacaagtcccaccattacggcttcgtgttgtgccaagcgctgccgtgttaccttgatccgtatcccgtctcccgctacggcatctatggtgcagtccccatctacgttatcaaaaagaccctgcttgaatatcgtaactccaacaagttgcacttggttaagttgttgatcctgaccaactgcactttcgacggtattgtgtacaacgtcaagcgtgttatcgaagagtgtttggccattaaaccagacttgatcttcctgtttgatgaagcatggtttgcttacgcgtgcttccaccctatcctgaagttccgcaccgccatgactgtggctgataagatgagatccaaagagcagaagaagatctactacaagatccataaaaagctgcttaaaaagttcggcaacgtgaagtctctgaacgaagtgtccgcggaaaagttgttgaagacccgcttgtacccaaacccttccgaatacaaggtgcgtgtgtatgcaacccagtctatccacaagtccttgacctctttgcgtcaaggctccatcattttgatctccgatgacaacttcgaatcccacgcctacaccccattcaaggaagcatacttcactcacatgtctacctctcccaactaccagatcttggccaccctggatgcgggccgtgcacaaatggaattggaaggttacggcttggtggaaaagcaggctgaagctgcgttcctgatccgaaaagaacttaacgatgacccaatgatttcccgttactttcgaaccctcaacgcggaggacttgatccctgattccctgcgtcagtgcgcagtgtcttacattaaaaagaaaaagaaaatgaaggactatgattcctccgattccaaatactctggaaacatcacctattcctgtaattccaactcccaagtcaagggcctggacccatctgaaaaccttaagtaccctattaaaaacatgtccatctcctacgaatatattaatgcctccaacgctatcaacaacaacaacgtttttctgcagaacgagttcaccaacaataacgcacacggcaactccaacaccgaagtgaataacgtctgccgtagcaataactcaccatcctccatcttgaataacaagaacgagcgatccattgatttgcacgaaaagaacaactcaaccaacacttacaatgataactcgcaaaccaagatcaactcctctctgaagaaaaagaaaaagaaaaacgataagactttgaactccatcacctacgactcgaacttttccgaagatacctataataacttgtccttcttggaaaatcgcaacaagaattacaataactcctcctattccggcggcatgaaaaactttttggaatacttcgaatcctcctggttgtccgaagacgagtttgtgttggacccaacccgaatcaccttgttcaccggatactctggcattgacggcgataccttcaaagtgaagtggctgatggataagtatggcatccagattaacaaaacctctatcaacagcgtgttgttccaaactaacattggcaccactggctcctcctgcttgttcttgaagtcctgtttgtccttgatctcccaggaattggaccaaaagaaatccttgtttaacgaacgtgatctgaaccagttcaacgagaatgtgtacaacttggtgtccaactatatcgaattgtctgagttctccgaatttcacccgctgtttaagaaaaagtacgcgaaccccaatatcttcaacaaggaaggcgatttgcgtaaagcgttttacttggcatacgaagaagattacgtcgagtatatcctgcttggcgatttgaaggagcgtatcaagcaaaacgaaatgatcgtttccgcatcttttatcattccatacccacctggcttcccggtcttggttcccggtcagatcgtctcccaagaaattgttgactacttgtcaggcttgtccgtgaaggagatccacggttatgatgaaaaccttggcttccgttgcttttacaacttcatcctggactatttctttaacatggacattaccgatccttactcctgttatcagaagatcgataaaaagacctacaaccaacttaaattcatgagcctctccaagaagaagaacattgaaaacatctacgacatgtacatctatgataacgaaaccaacaagatgaagaaattgtatctgtgcaacggcaaaattttcaaggaaaacaacatcccaatgaacgtcaattacaactttgattcctatcaggaaaacgccaataacaatgtcatcggtatctacgagaacctgaacaataacgttattatgcctaacatctccgaaaataacaccaataactgcatcaataacggcgtgtccaataacttgaacgactcagaagagaacatctaccagctgaacgaaaacgaggctaacaacaacattttgcaattcaacaagggctccatcacctctccaaagaagatgtccaccgaatcaatcattcagaatacctctaacgacgtcttgttggaagagaagaaaatgatcaagttctacgataacgttaacaacattaaaaacggagaatacaacatctttttgaacaaaattaaggaagagaacgagctgaagtacgaaaacgaggtctatggcaacaatcacaacaataacaagctgcttctcaatttcaacaaaatccattccgaaaactactattctcagaccaagttcaagaacttgatctacaactccaataactataagaagaactaccgcaactacaagtttcacaacaacaacagaaactacggtaacaagaactatatcaaagaacaaaaccgtgatttcaacaattccatctcctacatccgtaactccaacatcaatatgaacgtgatcaacaccaacgacaacaatcgcaatgataactctttgaccgaaaacaacttgaacaacgaagaaaagcgtaacatcgtcaacaaaaacaacaacaccatctacgacaatggcaactccgatatgaacaacatgaactccaacttcatcaacgatgaaaacaacaacatctgcaacaccaacaacaacttcatcaacgacactaataacattaacaccaacaacaactttgtgaaggactgcgataacaacatcaacaacatgaacaacaacatcatcaacaacatgattaataacatgaataactgtatgaataacaataacctgaactccgacaacatgccatccttctccgatgtcttctaccgtaagaaaaccaacaaattcaacaagtcggatgacggcatctattccaacaagctgaccgattttgttcccaaacttaagcagtccaacatcatcctctacaacaagattaagaaaaacgctttgatcatgcagaaagaacaagagaataacatgaactaccttaacgactgccacttgaagaacaactatttgaacgaaaagaacaacaaggacaacgaatactatagcgattcctccaagaaggtgaacgagaacatctccattaaggacgaaaacgataacttccagaagaaaaacaaatgcgtcaagcgtgactccctggaatataacttcaacaagatcgagaacaacgataacgaaaagaacaacatcatgtacaccgcaaactgtatctccaatatgaacattgacaaggaagacatctacaacaacaacaacaactatgtgaacaacaacaccactaacatcaacgagaacttgggctacaacatcaactactacccagatcagaacatcaacgaaaacatcgaagagatctgtaagaccaacgagttgtcaatccgcgaatcggagagaaataacctgaataacgagattcttgacaagaacgagttctgtaacatcaacaaccacgttaccaacatcaactccttgaacaactataactacgacaacgatgagatgatcaacgaaatgaactacaacaaccagaacgtgaacgaaaacaacaataacaacattaacaaccatatcaagaacgagctgacctacaacggcaacaacttcaactaccaagaaaacgagattaagaaaaactccatcttgcgtgaaaacgagatcgataagaactcccgtaagtccaacacccttaacaacaactcctacatcaacaacttgatcactaacgttgatgacgataccttcgtgcacaagcagggtaacttcttcttggaatgcgcattgaccaactctgaaatcaactgttcctctttcgagatggatgtgtccttgaataacatctactccaacggcgaatctatcaagcaacaccgtaactatgacaacgataagaaaaagaacgagttcaag

SEQ ID NO: 338 - DNA, 2130 bp, Aeromonas veronii
atgaatattatcgccattctcaaccatctgggagttttctttaaagaagaaccgatccgacaacttcaagcatcactggaaaggaaaggctttgaagttgtgtatccggttgatgtggccgacctgcttaaactgatcgagaaaaatcctcgcgtttgcggcgcaatttttgattgggacaaatactctctcggactgtgtaaggagatccatgatcgtaatgaaaaactgccgatttttgctttcgccaacgatcagtccacattggacattcatctgacggatcttagactcaacgtgcatttctttgaataccgcttagggatggctgatgacattgccttgaaaatgggtcaagccacccaggaataccaagatgcaatcttaccgccttttacaaaagcactgtttaaatacgtcgaagaaggcaaatacacattttgtacgccgggccacatgggcggcacagcattccaaatgagtccggcaggctcaatcttttatgacttctacggtcctaacgcgtttaaagcggatgtttcaatcagcatgccagaattaggctcactgctggatcattcaggcccgcacaaagaagcagaagagtatatcgcgcgtacgtttaatgctgatcggtcatacattgtcacgaatggaacaagcacggctaacaaaatcgtagggatgtattcagcaccggcgggcagcacggtccttgtagaccgtaactgtcataaatcacttacacatctgatgatgatgaacgatgtcaccccgatctattttcgtcctactcggaatgcctatggcattctaggcggcattccgcagagtgaattttcaagagatacaattgcagcgaaagtagctgccacaccgggcgcacaagcaccgagatatgctgtcgtaacaaattcaacgtatgatggactcctgtacaacaccggttttatcaaagaagcgcttgacactccgtacattcattttgattctgcttgggttccttatacgaatttctccccaatctatgagggtaaatgtggtatgagtggagaggcaatgccgggcaaagtgttttatgaaacacagagcacgcataaacttttagcagcattttcacaagcaagcatgattcacatcaaaggagatgttgaagaagaaacgtttaatgaagcgtttatgatgcatacatcaacatccccgcagtatggcatcgtggcatcaacagaaattagcgctgccatgatgcgaggaaatactggtaaaaggctgattaaagattctatcgaccgagcaattagctttagaaaggaaattaaaagactccgcgaccagtctgagggatggtttttcgatgtttggcaacctgataacattgacacagtggaatgttggaaacttgatccgaaggatgactggcatggctttaaagaaatcgatgacaaccacatgtatcttgaccctattaaagtcaccttgctcacaccgggcatgggaagagatgggcaactgcttgaaaaaggcattccggcatctctggtatccaagtttcttgatgagagaggaatcgttgtggagaaaacaggcccgtataacatgctgtttctgttttcaattggaatcgatcagtcgaaagcgatgcaattattgagagcactgacagagtttaaacgcggctatgacctgaatcttacgattaaatctatcttgccgtcactgtatcgggaagatccgtcattttacgaaggaatgcgtatccaggaactggcgcaacggattcatgaacttacaagcaaatatcgcctgccggaactgatgtttaaagcatttgatgtgctgccggaaatgaaaatgacaccgcatgcagcgtggcaacaggaactggcgggtaacgtcgtagaagttccgcttagagatatggtgggccgcatctctgctaatatgattcttccttatccgccgggcgttccgttagtactgccgggcgaaatggtcacacaggatagcttaccggttctggaatttctggaaatgctgtgcgaaattggcgcacattatcctggcttcgagacagatattcatggcttatatcgtcaagcagatggtagctacacggttaaagtgttgcgg

SEQ ID NO: 339 - DNA, 1395 bp, Prochlorococcus sp.
atgcgcctgaccgcattgctgaccactaagagaggcaagaacttgttcttgccggcacacggccgtggcaatgcattgccaatggaaatcaaggcattgttgaagaacaagccaggtctttgggatttgccagaattgcctgacattggcggtctgggcctttccgaaggtgcgatcgagatcattcagcaagagtgcgcatcctctatcggcgccaagaaaggttggtttggagtgaacggcgcaaccggtttgctgcaggcctcccttctcgctattgcgaagccgaaagagaacgtgctgatgccccgcaatatccaccgttccgtgatccatgcatgtattttgggcgacatcaatccagtcctgttcgatcttccttacttggaagaccgtggtcactataagccagccgatgttgactggtttcaggacgtgttgaacgcactggaaaaagagaatatcgtgatctccgccgtggtcctgaccaacccaacttaccaaggctattcagtgaacttgcgtccattgatcaccttgattcacaacaagaacttgccagttgtggtcgatgaggcacacggcgcgtacttctcctcctgcttggattcagacttgccacagtcggctctgaaggcaggtgccgacttggttgtgcactctctgcataaaagcgctaacggcctggtccagaccgcagcattgtggtggcaaggctctatggtggacccatacattgtccagcgttgcatccacctgttccaaacctcttctccgagcgcattgctgcttgcctcatgtgaagctgcgctgaacgaacttcgctccgagtatgcattggaaaagttgaagatcgctatcttgaaggcgcgtttcatcaacgatcgtctgcgaaaacttggcgtgccattgttggataatcaggacccattgaagttgatcctgcacaccgcagcccaaggcatctccggcattgatgcagatccttggttcattaaccgtggcttggtgggcgaacttccagagcccggcaccatcactttctgtctgggatttgcccgtcatcagggcattgttcgatctatcaagaacaattgggataagttgatctcctccggcttgccaatggattcctacccacctttcgagaagccgcccaacccatttgttaaggcattgtcctcctcctccttgtcggcattccgtggcgattctgaaatcgtccccctgtccaagtccgtgggtcgaatttccgcagacttgatctctccttatccacctggtattccgttgttgttcccaggcgaaatcctcacctctgaacttgtggagtggatgttgattcagaagaaaatctggccacagcagatctcctcccaaatccgtgtcgttaac

SEQ ID NO: 340 - DNA, 1326 bp, Carboxydothermus pertinax
atggctgaattgatcaacaagttgaagatccacttgaacaagaagcctgtgtccttccacatgccgggtcataagaacggccgtttcttgccaaagaaggtgaagaacttgttgggcgaaaaatacttctctgccgatgtgaccgaattgccaggcttggataacttgttcaccccagaaggcgtgcttctcaacttggaagcgaagatcgcacgttacttcggctttccacgtgcacacttgtccgtgaacggttccaccgcagccgtgcttgccctcatgttgtctttctttaagccaggcgaaaaagtggtcgttgatcgtatgagccacatctccttgtaccacggcatggttctgggcgatttgttgcccgagttcatctacccagactgggatgacgagtatggcttgcctgtgaacaagaatccgaacaccaatgcgaaagcatacttccttactaaccccgattaccacggcttggtgcgtgatttgagcgaattgaagaccgctaaaatcttcctggacgctgcacacggcggcttgattccactttggagaaaggatttctttcaaaacatcgacggtttcgcagtgtccttgcacaaaaccggcccatttcccaacccattggcagccgtggtctactgggatgaaaaggttgaggtgaaacgtgcactgaaccttgtgcagaccacctctccttcttatccgttgatggctgcggcagaaggcggcgtggatatgcttctccagtccggccgtcgtgcaatgcaaaaggcagtcgaagttgcccagcttttcaaagaatccttgaagaagcgtggtatcggcttcttgcaggctaagtacagcgcggagccattgaaggtgaccctgaaagcacaggatttgggaatgtccggcgaaaagatcgccaacgtcctgatgaagaaaggcattttccccgaggcatacggcccaggttatgtgttgttcatgttgtccccaggcaacaccgaaaatgaggtgaagaaattgctgaaggtcatcgactcgttgaagggcaccaaacaacgcattatgctgcccaagaacccattccagggtcaatccaagttgaaattgaccccacgtgaagcatactatgctaaggaaaaatgggtcgagctgcaggatgccgctggcaagatcgctcgtgacggagtcaccctgtacccacctggcgcgcctgttctttatccgggtgaagagatcacccgtgaagccgttgcttacattaactatcacctgaagttgggcttgaccgtgactggcatcaaggatggccgtatccgtgtgatccgt

SEQ ID NO: 341 - DNA, 2145 bp, Escherichia coli
atgaatgttattgctatcttgaaccacatgggcgtgtattttaaagaagaaccgatccgagaactgcacagagcactggaaagattgaacttccaaatcgtctaccctaacgatagagatgacctgcttaaactgatcgaaaataacgctcgcctgtgcggagtaattttcgattgggacaagtacaatctggaactgtgtgaagaaatttcaaagatgaacgaaaaccttccgttatatgcgtttgctaacacttactccacactggatgtttcactgaatgacttgcgactccaaatttcatttttcgagtatgctctgggcgcagcggaagatattgccaacaaaattaaacagacaacggacgaatacatcaatacgatcctgccgccgctgaccaaagcactgtttaaatatgtccgggaaggcaaatacacgttttgtacaccgggccacatgggcggcacagcgtttcaaaaatcaccagttggctcactgttttatgatttctttggaccgaacacaatgaaaagcgacatttcaatcagcgtgtctgaattaggctcactgctggatcattcaggcccgcacaaagaagccgagcagtatatcgcaagagtttttaatgcggatagaagctacatggtaacaaatggcacatcaacagctaacaaaattgttggcatgtatagcgcccctgcaggatctacgattttaatcgatcgcaactgtcataaatcccttacacatctgatgatgatgagtgacgtgacgccgatctattttcgtcctacccggaatgcctatggcattctaggcggcattccgcaaagcgaatttcagcatgcgacaatcgctaaacgtgttaaggaaacgccaaacgctacctggccggttcatgccgtgattacaaattcaacgtatgatggactcctgtacaacactgacttcattaagaaaacactggatgttaaatccatccatttcgacagtgcatgggtgccttatacaaatttcagcccaatctacgagggtaaatgcgggatgtctggcggacgggttgagggcaaagttatctatgaaacgcaatcaacacataaacttctcgctgcattttcacaggcgtcaatgatccacgtcaaaggcgatgtaaacgaagagacgtttaatgaagcatatatgatgcataccactacatcaccgcattacggaattgtcgcctcaacggaaaccgcagcggctatgatgaagggcaatgcaggaaaaagacttattaacggtagcatcgaacgcgcgattaaatttcgtaaggaaattaaaagactccgcacggaatcagatgggtggtttttcgacgtttggcaaccggatcatattgacacgaccgaatgttggcctttaagatccgatagtacatggcatggctttaaaaacatcgataacgaacacatgtatcttgatccgattaaagtcactttgctcacaccgggcatggaaaaagatggcacaatgtcggactttggcatcccggcctcaattgtagcaaaatatttggatgagcatggtattgttgtggagaaaacaggcccgtacaatctgctgtttctgttttcaatcggaatcgataagactaaagcactgtcactgttgcgcgcgttgaccgattttaagcgtgcgttcgacctgaatcttcgggtcaaaaacatgttgccgtcactgtatcgagaagatccggaattttacgaaaatatgcgcattcaagaacttgcacagaacatccataaactgattgtacatcacaatctgccggatcttatgtatcgcgcgtttgaagttcttccgacaatggttatgacaccttacgccgcattccagaaagaacttcatggcatgacggaagaagtttatctggatgaaatggtaggacgtatcaatgctaacatgattttgccttatccgccgggcgttccgctggtaatgccgggagaaatgattacagaagagagccggcctgttctggaatttttgcaaatgctctgcgaaatcggcgcccattatccgggcttcgaaacggatattcatggcgcgtatcggcaggctgacgggcgatacacagtcaaggtattaaaagaagaatcaaagaaa

SEQ ID NO: 342 - DNA, 468 bp, Pantoea ananas
atgaatattcttgctatcatgggcgcacatggcgtgttttataaagatgaaccgcttagagaactggacgtggcactgtcacaacagggtttccaacttattcgcccaaaaaataccgatgacctgcttaaactgatcgaacataacccgagaatttctggcgtcatctttgattgggacgagcacaattcccctgaattatgcggagagattaatcaattgaacgaatatctgccgttgtacgcatttatcaatacgcattcacagatggatattagcatcaacgaaatgcgtctcccgctgcatttctttgagtatgcactcaacgcagcggatgacattgcgttgcatatccggcagtatacagatgactacctggatcacattacaccgccgctgactaaagcactgtttacgtatgtaaaagaaggaaaatacacattctgtacgcctggtcacatggccggg

SEQ ID NO: 343 - DNA, 1179 bp, Selenomonas ruminantium
atgaagaacttccgtttgtcggaaaaagaggtgaagaccctggcgaaacgaatcccaaccccattcttggtcgcatccctggataaggttgaagagaactaccagttcatgcgtcgtcacttgccacgtgcaggcgtgttctacgccatgaaggctaatccgaccccagaaattttgtctttgctggctggcttgggctcccacttcgacgtcgcctctgctggtgaaatggagatccttcatgaattgggcgtggatggttcccaaatgatctacgccaacccagtcaaagacgctcgtggcttgaaggcagccgctgattataatgtccgtcgtttcacctttgatgacccatccgaaatcgacaaaatggcgaaggcagttcctggtgcggatgtgctggtccgcattgcagtgcgtaacaacaaggcattggtggatttgaacaccaagttcggcgcgccagtcgaagaagcattggatttgttgaaggcggcacaggatgcgggcttgcacgcaatgggcatctgcttccatgttggctcccagtccttgtccaccgccgcatacgaagaagcattgttggtggcacgtcgtttgttcgatgaagccgaagagatgggtatgcaccttaccgatttggacatcggcggcggcttcccagtccctgacgccaaaggccttaacgtggatttggcggcaatgatggaagcaatcaacaagcagattgaccgcctgttcccagataccgcggtgtggactgagccaggccgttacatgtgcggcaccgcagtcaacttggttacctctgtgatcggcaccaaaacccgtggcgaacaaccgtggtacatcctggacgagggaatctacggctgcttcagcggtattatgtacgatcactggacctatcccttgcattgtttcggcaagggaaacaagaagccatccacctttggcggtccctcatgtgacggcatcgatgttctgtaccgtgacttcatggcaccagaacttaaaattggcgataaggttctcgtgaccgagatgggctcctacacctctgtgtctgccactcgtttcaacggcttttatcttgctccgaccatcatttttgaagatcagcccgagtacgccgctcgactgactgaagatgacgatgtgaagaaaaaggcggcagtc

SEQ ID NO: 344 - DNA, 2265 bp, Polynucleobacter necessarius
atgaagttccgtttcccaatcatcatcatcgatgaagacttccgctccgagaacatctccggttctggcatccgtgatttggctgaagcgatcgaaaatgaaggcgtggaagtgatcggcttgacctcttacggcgatttgacctctttcgcacagcaggcatcccgtgcatccaccttcatcgtttccattgatgacgaagagtttgatagcgactcagaagatcacgaccttccggccctcaacaacttgcgtgctttcatcaccgaagtccgcaagagaaacgaggacatcccaatcttcttgtacggcgaaacccgcacctctcgacacatgcctaacgacatcctgcgtgagcttcacggtttcattcacatgaatgaagacacccctgagtttgttgcgcgtcacatcattcgagaagcaaaggtgtacttggatagcttggcgccacctttctttcgtgcgcttaccaactacgcatccgagggctcctattcctggcactgcccaggccattccggcggcgtggcattcttgaagtcccccgttggtcgtatgtttcaccagttctttggagaaaacatgttgcgagccgatgtgtgtaatgctgtcgaagaattgggccagttgctggaccataccggtccggtgcttcaatctgagcgcaacgcagccagaatcttcaacgccgatcacctgttctttgtcaccaacggcacctctacctctaacaagatcgtctggcattccaccgttgcaccaggcgatgtggtcttggtggaccgcaactgccacaagtctgtcatccatagcattaccatgatgggcgccatcccaattttcctgatgcctacccgtaaccaccttggaatcattggcccaatccctaaagaagagttcgaatggaagaacatcaagaaaaagattgatgtgaacccattcatcaaagacaagaatgttgtgcctcgtgtcatgaccctgactcagtccacctacgatggcatcgtgtataacgtcgaaatgattaaagagatgctcgatggcaaggtggactctttgcacttcgacgaagcctggctgccacacgctgctttccatcctttttacaaagatatgcatgcgatcggctccgaccgtaagcgaaccaagaagtccttgatgttcgcaacccagtccacccacaaacttctcgcgggcctttcgcaggcatcccaagttctcgtgcaagatgcggaagacgcaaagttggatcgtgactgcttcaacgaagcatacttgatgcacacctctacctctccacagtatgccatcattgcttcatgtgatgtttcggcagccatgatggaatccccaggcggcaccaccttggtggaagagtcaatcgcagaagcaatggatttccgtcgagccatgcgagaggtcgatgacaaattcggcgctgattggtggtttaaggtttggggtccagaccacctggcggaagagggcatcggtgaacgctctgattgggtgcttgagccaagcgctccctggcatgacttcggcaaattggcaaaggattttaacatgctggacccgatcaaggcaaccgtcgttaccccaggcttggacatcgagggtaacttcggctctatgggcatctctgcctctattgtgaccaaatacttggctgaacacggcgtgatcgttgagaagtgcggcttgtattccttctttattatgttcaccatcggtattactaagggccgttggaacaccctcgtgactgagttgcagcaattcaaagatcactttgacaagaatgcgccactgtggaaagtgcttcctgagttcgtcgcaaagcacccacgttacgagcgagtcggcctgaaagacatctgccagcaaattcatgaattttacaagtcccgtgatgttgcacgaatgaccactgagatgtatacctctgacatgatcccagccatgatgccttctgaagcatgggcgaaaatggctcacaagcaggttgatcgtgtgccgctggaccgccttgagggcagagttaccgccatgttggtgaccccatacccgcccggtatcccgttgctgatcccaggcgaacgtttcaacaaacgaatcatcgattacttgtatttcgctcgtgactttaatgaaaagttcccaggctttgaaaccgacatccacggcttggttaaaacctctgtggatggcaagtctgaatactatgtcgattgcgttcgccaagagagagacatcaccctg

SEQ ID NO: 345 - DNA, 1335 bp, Staphylococcus aureus
atgaaacaacctatcctgaacaaacttgaatcattaaaccaagaagaagcaatttcactgcatgttccgggccacaaaaacatgacaatcggacatttgtcacaactcagcatgacaatggataaaactgaaattcctggcctggatgaccttcatcacccagaagaagttattctggaatctatgaaacaggtagaaaagcattccgattatgacgcgtactttttggttaacggcacaacgagtggcattctgtcagttattcaatcattttcacaaaagaaaggagatattcttatggcgcgtaatgtccataaaagtgtattacacgctttggacatttcgcaacaagaaggccattttatcgaaacacaccaatcaccgttaacgaaccattacaacaaagtgaatctgtcaagactgaataacgatggccacaaacttgcagtcttaacctaccctaactattacggagaaacgtttaatgtcgaagaagttattaaatcactgcatcaactcaacattccagtgctgatcgatgaagcacatggcgcacattttggcttgcagggattcccggattctacactgaattatcaagccgactacgttgtgcagagctttcataaaaccctgccggcacttacaatgggctcagtcctctacatccataagaacgcgccttaccgagaaacgattatcgagtatctgtcctactttcaaacatcatcaccgagctatctgatcatggcttctttagaatccgcagcgcagttctataaaacatacgatagcacggttttctttgacaatagagcccaattaattgaatgcctggaaaagaaaggatttgaaatgcttcaggttgatgacccgctcaaactgctgattaaatacgaaggttttacagggcatgatattcaaaactggttcatgaatgctcacatctatcttgaattagccgatgactaccaggtattagcaattttgccgctctggcatcacgatgacacgtatctgttcgattctctcttgcgtaagatcgaagacatgatccttccgaagaaatcagtttcaaaagtgaagcaaacacagctcctgaccactgagggtaactacaagcctaagagattcgaatacgttacgtggtgtgatctgaagaaagcaaaaggcaaagttttagcgcgccatattgtgccatatccgcctggtatcccgattatctttaaaggggaaacaattacggagaacatgatcgaattggtcaatgaatatctggaaacgggtatgatcgtagaaggcattaaaaataacaaaattcttgttgaagatgag

SEQ ID NO: 346 - DNA, 1956 bp, Aquitalea magnusonii
atgaccccagtgtcccgtgtgttggtggtgtccgatgacgccaagtggcagtctgatgtgcttgctggcttgggtgctgttgcggtgcgacttgaaaacccctacggtttgaccttcatcggagcgtcccgcctgaaagaggcaatggacatcattcgtcgagatggcgacattcaagcagtcttggttgataagcagctgcaagaaaaaggtcttaaccaggcagccgtggcattggccaatcagatctccgactttcgtcctgaattgtccttgtacgtcttgctgatggatgacgatgaacgagtgttggtggaaaacttggcttcccacgcggtggatggatacttctatcgtgatgaaaccgactacaatggctggtttcgaatcctgaccgcagaacttgccgagaagtccgctaccccattctacgataagctgaaacagtatgtccgtatggctaaggactcctggcacaccccaggccatgcaggcggcgattcgttgaaaggctccccctgggtgggcgatttctacgactttgtcggtgaaaacatgctccgtgcggatttgtccgtgtccgtgccaatgctggactctcttctccatcccaccggcgttatcgcggagagccagaagttggctgcgaaagcattcggcggccgtaagacctactttgccactaacggcacctctacctctaacaaggtcatcttccaaaccttgctggcaccaggcgataagttgttgttggatcgtaactgccacaaatccgtgcaccacggcgtgatcctgtctggcgcacttcctgtttacttggattcctccatcaacaagcagtatggaattttcggcccggtgcccaaagccaccatctttgcagccattgaagcaaatccggatgcccgtgtcttgatcctgacctcttgtacctacgatggcttgcgatatgacctggttcccatcattgaagctgcgcatgccaagggtatcaaagtcattgttgacgaggcatggtacggattcgcccgctttcacccggcattccgtcctaccgcgctggaaagcggagcagattatgttacccagtccacccacaagatcttgtccgctttctctcaggcatccatgattcacgtgaacgatccgggttttgacgaacacttgttccgtgagaactttaatatgcacacctctacctctccacagtacaacttgatcgcatccttggatgttgctcgtaagcaagccgtgaccgaaggctatcgcctgcttgacagaacccttaagttggcagaagagttgcgcgataaaattaactccaccggtgcattccgtgtgttggaactggaggatttgttgccagaagagatgcgtgaggatggcatccgattggaccctaccaagctgactgtggatatttcacagtcgggtttcaccactgacgaactgcaacacgaactttttgagcgttacaacatccaggtcgaaaagtccaccttctccaccattactctgcttctcactatgggcaccactcgctccaaggtgtcccgtttgtatgatgccttgctgcgcttggctaaggaaaagcgtgcaccacgtgcagttggcagaatgccagagatccctcgtttctcccgattggcatgcctgcctcgcgacgctttttacgaagcgggcgagagactgccattgttggatgatgacggccgtcctaacgcagccttgaatggtcgagtctgctgtgatcagatcgttccatacccacctggtattccagtgttggtgccaggccaagtgatcgatgacagcattctttcatacttggctcgtttgcagaagacccagaagaccatcgaaatgcatggcctggcggaagatggcggcgaaatgtacgttcgtgtgttgaaggatcgagagctgtcccaccttccagaccgtttgctgttcggc

SEQ ID NO: 347 - DNA, 2124 bp, Haemophilus somnus
atgaaacaaattcttatcggctattccatgtacaatgatcatctgcagaacctgatttctgcattagaagagaaaggctataagacaacggcggtcgatggacatcaagaaatcctgcacgcggttaaaaataacgcttctatcatctccgtgattctcagcaacgatattatcgataaggacttgacagacaagattctgcttttaaacgaagatctgccgatcttttcactgaaagacaccgatgacttgaatgagaatctggattttgccactattggccatcacgttcagttcgtggattgcaatctttacacattagacgaaatcatccataagattgaacgagcagtcgagaagtactttgatagcatcacaccgcctctgacgaaagcactgtttaaatacgtaaacgaggataagtacaccttttgtacaccgggccacatgggcggcacagcatttttacgctcacctatcggtagcgtgttttatgatttctttggcaaaaatacgtttaaatctgacatttcagtttcagtgggcgaactgggctcactgctggatcattccggcccgcacaaagaagccgagaagtatattgcaaatgtctttaacgcggatagatcttacatcgtaacgaatggcacatcaacagctaacaaaattgttggcatgtatagcgccccttcaggaagcacagtgctgattgatcgtaattgccataaatcactgacgcatctgcttatgatgagcgacgtgacacctatctatctgaaaccaacgcggaacgcgtacggcttactgggcggcattccggaacaagaattttcaaaatcagctatcgaaaagaaactggccgatattgacaatcctaactggccagtccatgcggtaatcacaaatagcacgtatgatggattattttacaacaccgacaaaatcaaagaaacactggatgttaaatcaatccatttcgactcggcttgggtgccgtataccaacttcaaccctatctatgaaggtaaaactgggatgggcggaaaacgtgttgaagataagatcatctatgagacccaatcaacacataaactgctggcagcattttcacaagcatcaatgatccatatcaaaggccagatcaatgaagagacgtttaacgaagcctatatgatgcatacatcaacatcaccgcattacggtattgtctcaagcacagaagtagctgccgcaatgatgaagaacaacacaggcaaacaacttctccaggatgccattacacgcgcagttcgctttcgaaaagaaattaaacaacgtatgcgggagtcacagagctggtattttgatgtgtggcaaccggaaaatatttcatcaacagaatgctgggaactgaaacctggcgagagctggcatggctttacaaacatcgataagcatcacatgtatcttgatccgattaaagtgacattgctcatgcctggactgaacaaagataacacacttgacccgaatggtattcctgctacgcttgtctcaaactatctggatagcaaaggtattatcgtcgagaaaacaggcccgtacaatatcctggttctgttttcaattggaatcgatgacacgaaagcaatgagcttaattcaagcgttggatgactttaaatctctttatgatgccaatgtcttggtaaaagacattctccctaacatctatgcgcatgctccaaaattttacgaaacaatgcgcattcaagaactggcaggcggcattcatcgcttgatctgcaaacacaatttgccggatctgatgtttaaagcatttgacattctgccaaagatgatcatgacgccgaacaaagcgtttaatctggaactgaagggcaacattgatgaatgttatgttgaggacatggtgggaaaaattaatgcaaacatgatcctgccgtatccgccgggcgttccgcttattatgccgggagaaatgatcacagaagagtcaagagcaattctggaatttcttgtaatgctctgtgagatcggcacacattatccgggctttgaaactgatattcatggcgcttatcgacaggatgacgggaggtacaaagtgaagattatcaatatt

SEQ ID NO: 348 - DNA, 1446 bp, Tepidanaerobacter syntrophicus
atggaaaagcaagagattaacaaattctctaagaccccattgatccaggcgctgaaggaatacgagaagaaagatagcttgcgttttcacatgccaggccataaaggccgatgccctaagggcgttttctgtgacatcaaggaaaacttgttcggttgggacgtgaccgagatcccaggcttggatgacttcgcccagccggaaggcccaatcaaggaagcacaagagaagttgtcggcgctgtacggtgcagatacctcttattttctggtcaacggagcaacctctggcatcatttccatgatggctggcgcgttgtccgaaaaggacaaaatcctgattccacgcacctctcacaagtccgtgttgtcaggcttgattctgaccggtgcctccgcagcctacatcatgcctgagcgatgcgaagaattgggcgtgtatgcgcaggttgaaccatgtgcaattaccaacaaactgatcgagaatcctgacatcaaggctattcttgtgaccaacccggtctaccaaggcttctgccccgacattgctcgcgtggcggaaatcgcaaaggagagaggcaccactttgctggccgatgaagctcagggtccgcacttcggcttctccaagaaggtgccacagtcggccggcaaattcgcagacgcctgggtccaatccccacacaagatgcttacctctttgactcagagcgcttggttgcatattaaaggtaaccgtatcgataaggaacgacttgaggatttcttgcatattgtcaccacctcttctccatcctacatcttgatggcctctctggatggcacccgcgaacttattgaagagaacggcaactcctatatcgaaaaagcggtcgagctggcgcagaaggcaagatacgaaatcaacaattccaccgttttctatgcaccgggccaagagattctgggcaagtacggcatctcctcccaggacccattgcacttgatggttaacgtgtcctgcgcgggctacaccggttatgatattgaaaaggcattgcgtgaggacttctctatctacgccgaatatgctgatttgtgtaacgtgtacttcctgattaccttctccaataccttggaagacatcaaaggccttctcgcggtcctttcccatttcaagccattgaagaacaaggttaagccttgcttttggatcaaagatcttccgaaggtggcattggaacccaagaaagccttcaaattgccagcaaagtccgtgccattcaaggactcagccggctccgtgtccaagcgtccacttgtgccttacccaccaggcgctccattagtgatgccaggcgaaatcattgaaaaggagcacatcgaaatgattaacgagatcttgaactccggcggctactgtcagggcgtgacctctgagaagttcatccaagtggtcactgatttt

SEQ ID NO: 349 - DNA, 2148 bp, Serratia sp.
atgaacatcattgcaattatgcgtccagaaggtgtctactataaggatgaacccatccgcgagctggacgcagcccttgagatcctcggcttcaaaaccatctacccacgtgatcgtgcagacttgctgaagttgatcgaaagcaacgcccgtatctgcggtgttattttcgattgggaccagcactcaaccgagctttgtgtggatattaacgaattgaatgagtacttgcctctgtatggctttatcaacactcactcaactatggatgtgtccgtgcatgacatgcgtatggttttgtacttctttgaatatgcactgaacgctgcggaggacatcgccaagcgtattcgacagtacaccgatgaatatatcgaccaaattaccccaccattgaccaaggcattgttcaagtacgttgaagagggcaaatatactttttgcaccccaggtcacatggccggcaccgctttccttaagtcccctgtgggcaccttgttctacgatttctttggcgcgaagaccttgaaagcagacgtctccatctctgttactgaactgggctccttgttggatcacaccggcccacacttggaagccgaagagtacatcgctcgtactttcggtgcggagcagtcgtatattgttaccaacggcacctctaccgcaaacaagatcgtgggcatgtactccgcgcccgcaggttctaccgtcctgatcgatcgtaactgtcacaagtctttggcccacttgatgatgatgaccaacatcattccaatctacttgcgtccattgcgaaatgcatacggcatcttgggcggcatcccacagcgtgagttcacccgtgattccatcgccggcaaggttgagcaaaccaaagacgcatcatggcccgtgcacgccgtcatcaccaactccacctacgatggcttgctgtacaacactgactatatcaagaacaccctggatgtggctagcattcacttcgactcagcgtgggtcccgtacaccaactttcatcccatctatgatggcaagtccggcatgtccggtgaacgtatcccaggcaaggtcatctacgaaacccagtccacccacaagttgctcgcagccttctctcaggcatccatgatccatattaagggtgactacaacgaaaatacctttaacgaggcgtatatgatgcacaccactacctctccgaattacggcatcgtcgccagcgctgaaaccgctgcggcaatgcttcgtggaaacccaggccgtcgtttgatcaaccgctccgttgaacgtgcattgcacttccgaaaggagatccagcgcctgagagaagaaaccgatggttggttttacgacgtgtggcaaccagaagacatcgacgaagcggagtgctggccattgaaccctgatgacaattggcacggcttcgcgaacgcagataccgagcacatgtacctggacccaatcaaggttactattcttacccctggcatggatgaaaccggtaacctgagcgctgagggcatcccagccgctcttgtcgcgaaattcttggatgaacgtggcgtggtcgttgagaagaccggcccttacaacttgctgttcttgttttccatcggcattgataagaccaagtccatgtcattgatgcgtggtctgaccgatttcaaacgagcatacgatttgaacttgcgtgtgaagaacatgttgccggatctgtacggtgaagatcccgacttttatcgccacatgcgtatccaggacctggctcaaggcattcaccgacttatcattaagcatgatttgccatccttgatgctgaaagcgttcgacgtcttgccagaaatgaagatgaccccttacgagatgtttcagcaccaagttcgtggaaacatcgaagagtgcgagattgatcagttggttggccaagtgtccgctaatatgattttgccatacccgcccggtgtgccggtggtcatgccaggcgaaatgatcaccaaggagtcccgcgcggtcttggacttccttctcatgctgtgttctattggagaacacttccctggctttgaaaccgacatccacggcgcacgtctgaccgaagacggcaagtactgggtcaaagttttgaagaaaggcgtgctggatgcc

SEQ ID NO: 350 - DNA, 1443 bp, Eubacterium siraeum
atgctgtcccaggaacgtgcgccgatctacgaagcacttaaggagtatcgtgccaaacgaatcgttccgttcgatgtgcccggccacaagatgggacgtggaaaccccgaacttaccgagtttctcggtagagagtgcatgaccgtggatgtcaactcctctaagccgttggacaacttgtgtcatccagtgtccgtgatcaaggaagcagagcagatcgcagccgaagcattcggagccaagaacgctttctttatcgtgaatggcaccactgctgcggtccaagctatggcgctggcagttgccaagcgtggcgagaaaatcattatgcctcgcaacgtccacagatccgcaatcaacgcacttattttgggcggcgcagtgccagtttacgtgaaccccggcgttaacaaggaattgggtatcccactgggaatgaccgtggaagatgtcgagaaggctatcctggagaacccagacgctaaagcggtcttcgttaacaatcctacctactatggcgtttgctctgacatcaagaagatcgcggacttggcacacgcacacggcatgtacttgctggccgacgaagcacacggcacccatttctattttggcgataacatgccactggcaggcatgaaggctggtgcggacttcgcagccgtctccatgcacaaatccggcggctccttgacccagtcctccttcttgctcaccgccgatactgtcaacgaaggctacgttcgtcagatcatcaacttgatgcaaaccacctctggctcctacttgctgatgtcctccttggacatctcccgtcgtaacttggcactgcacggccgtgaaatcttcgcgaaggtgcagtcttacgcacaatatatgcgagacgaaatcaacgagatcggcggctactatgcattctccaaagagctgtgtgatggcggtgctttctacgattttgacgttaccaagttgtcaattcatacccgtgacatcggcttggcaggaattgaagtgtacgacatcttgcgtgatcgttatggcatccaaattgagttcggcgacatcggtaacattttggcgtacgtgtccattggcgatcgtgaactttacttggatcgacttatcggcgcattgaatgacatcaaacgtatctactccaaggataaaaccggcatgctcgaccacgagtatatcaacccaattgtcaagctgtccccacaggatgctttctacggtaacaagaagtccgtgccaattgaacagtcctccggcaagatctccggcgagtttgtcatgtgctacccacctggcatcccaattcttgcgcctggtgaacagatcaccgatgagattttggcctacatcaagtatgctggcgataaaggctgtttcttgaccggcacccaagacctggaaatcaagaacatcatgattttggatgag

SEQ ID NO: 351 - DNA, 1512 bp, Bacteroides pectinophilus
atgttaccgacaaattcaggccagaaaacatttgataacgaggatgaccttttcgacagattagaaaactactgctcaagcggctacattccaatgcacatgccgggacacaaacgcaatacacagcttattgatacgggcaacccgtatggcattgacatcacagaaatcgatggttttgacaatctgcatcacccggatggctttctgaaagaagcgcaagagcgtgcagcgcagtattacgatgctgccaagacgtggtatctggtttcaggttcttccattgggttgatgagcgctatcctcggcgtgacatcaagacatgatactgtgttagtcgcgcgcaattgccacatttcagtctataacgctatctacgaaaatgaactgaacccgcaatacatctatcctaagttcgttgataatctttggatttcatcaggaatcttaagcaacgacgtagagaaagcactgaaaaattgtgttaaaaacgaaaagggctcaggaaaagtaggtgctgttattatcacctccccgacgtatgaaggcaatgtttcagatattagagctatcgccgacgttgtgcataaatatggcgtgcctcttattgtcgatgaggcacatggcgcacattttaaatactcggaaaagttcccacaatcagctctcggtctgggggccgatgtcgtagttcaatccttacataaaacattgccgtcactgacacagacggcactgcttcatgtaggccgggaagcggttaataagaaaagactcatcgctgatattgaccgctatctgaacatgtttcagtctacgtcccctagttacattttaatgggaagcattaatcgctgtatccgtttgatgaactctgaaagaggcagagcagttatggataactacacaaaggaactggaaaaactgagacgccgtttagaaaaattgagagtgatcaaactggcaaaatcagatgacattagtaaacttgtcatctatacagaagatggctgcctgcaaggaaaacagctttacgacattctcttgaagagatatagaatccaactggaaatggcttctttgcgctatgtcattgccatgacaggaccgggcgatacgaaagaatattacgatcggttttacgacgccttgtgtgagattgataaagaactggcaggtagaagcggcacatctgacatcggctcaagcgaaacggtgaatattagccgtcctgtcatcaaaatgaatctgtatgatgcggtgaactgcgaagacaaggagtctgtcgaataccatgatgcatgcggcagagtttcagcatcaacagtctgtatctatccgccgggcattccgcttgtatgtccgggcgaagttattaatcgaaacatgatcgatacagtagacaacgcgtttagagatggactggacgttatgggcctggaaggactggaagcaggtctttgcggggcagcgccggatgaacgtaaaattgtgaagatcctttgtttacgg

SEQ ID NO: 352 - DNA, 468 bp, Pantoea ananas
atgaacatcttggctattatgggcgcgcacggtgtgttctacaaggatgaaccacttcgtgaattggacgtcgcactttcccagcaaggctttcagctcatccgaccgaagaacaccgatgacttgctgaaactgattgaacacaacccacgtatctccggcgtgatcttcgattgggacgagcataactccccagaattgtgcggagagatcaaccagctgaatgaataccttcctctctatgcattcattaacacccactcccaaatggacatctccatcaacgaaatgcgcttgccgctgcacttcttcgagtacgcacttaacgcagccgatgacatcgccctgcacattagacaatacaccgatgactatttggaccatatcaccccacctttgactaaggcattgttcacctacgtgaaggaaggcaagtataccttttgtaccccaggccacatggcgggc

SEQ ID NO: 353 - DNA, 2250 bp, Allochromatium vinosum
atgcgtttccgatttccagtggtcatcattgatgaagacttccgatcggagaacgcatccggcctgggcatccgtgcattggctaaggcgttggaatccgagggcttggaagtcctgggtgttacctcttacggcgatttgacctctttcgcgcagcaacagtcccgtgcatcttgcttcatcttgtctattgatgacgaagagtttggctccggctccccagaagaagcattggaagcattggccaccttgcgtgcattcgtgcaggaagtccgcctgagaaacgaggacatcccgatttttctttacggtgaaacccgcacctctcgacacatccccaatgatgtgctgaaggagcttcacggcttcatccacatgtttgaagacacccctgagttcattgcgcgttacgtggcacgtgaatcccgtgtgtacttggattcgttggccccacctttctttcgtgcattgacccactacgcagccgactcctcttatagctggcactgcccaggccattccggcggcgtggcattcttgaaatcccctgtgggtcaaatgtttcaccagttctttggcgaaaacatgctccgtgcggatgtgtgcaatgcagtggatgagctgggccagttgctggatcattccggtccggtggctgcgtctgaacgcaacgcagccagaatcttcaactgtgaccacttgttctttgtcaccaacggcacctctacctctaacaagatcgtctggcatagcaccgttgcccccgatgacattgttgtggtcgatcgcaactgtcacaaatctatcttgcatgcgatcattatgaccggcgcaattccagtcttcctgatgcctacccgtaaccactacggaatcattggcccaatccccctggatgagttcaagccagagaacatccgtcgaaaaattgctgcgaatccgtttgccaagggcatcgacgctaaaccccgtgtgcttaccattactcagtccacctacgatggtgttttgtataacgtggacaccatcaagtccttgttggatggcgaaattcacaccttgctgttcgacgaggcgtggttgccgcacgcatccttccatgatttttacaccggcatgcacgcaatcggcaaggaccgtccccgatgccatgaatctatggtgtttgccacccagtccacccacaaacttctcgccggcctgagccaggcatcccagatccttgttcaggaatcagatcaacgtcagctggatcgagactccttcatcgaggcttaccttatgcactcttccacctctccacagtatgccatcattgctagctgtgatgtcgcagccgctatgatggaaccaccaggcggcaccgcgctcgttcatgaatccatcatggaggccttggacttccgtcgtgcaatgcgaaaggttgatgaagagttcggcgaggactggtggtttaaagtgtggggtccagactaccttgcagaagagggtatcggcgatcgtgatgactggatgttgcacgcggatgaccactggcatggcttcggtgaattggcaccaggctttaacatgttggacccaatcaaggccaccgtgattaccccaggcttgaatatggacggcgagttctccgagtcgggcatccctgcggcaattgtcaccaagtacctggctgaacacggaatcgttgtggagaaaaccggcctttattccttctttattatgttcaccatcggtattactaagggccgttggaacactatggtgactgaattgcaacagttcaaacacgattacgaccgcaatcaaccgctgtggagagtgcttcccgagttcatccaggcccacccacgttatgagaagattggtctgcgagatctttgcgacgagatccacggcatctacaaagccaacgatgttgctcgtctcaccactgatatgtatttgtccgacatcgtcccagctatgaagcctgctgttgcgttcgcaaaaatggcgcaccgcgaaatcgagagagtgggtattgatgacctggaaggacgtgttacctctgtgttgctgaccccatacccacctggtatcccgcttctcatcccaggcgagcgcttcaacgccaccatcgtgcgttacttgcagttcgcacgtgagttcaacacccgattcccaggttttgaaaccgacatccacggcttggtgaaggaagagaacggcggcgaagtgtcctacttcgtggattgtgttcgtcctttg

SEQ ID NO: 354 - DNA, 2862 bp, Brevibacterium linens
atgaccggcatcgattcggacgaacactccggacaggcgtctttcgtgcccggtccagcagcagcaggcggcaccccacgtaaacgcctggattccgattcctccggcggctccgctgaaaccggcttccgttcccgtccaaagaagtcccaactggagcgtgaccccggtatgccagcgtctacctggcgacttcgcagcgatgcatgggaataccttaagttcgcgatcaaacgtttggcaatctccggcggcgatttttctatgatcgcggcagatggcgaagtgtggcgttccttgcgttctcttaagaccatcgagttgtactggggcggtttcggccagcgttatgtcgaagatattgccgagttgctgtccaacggtgaatttgataaagcgcacgacatgatcacccgtgcagtgaatagactgcgtggcaccaccgtgccagacgtcaccgaagatgaccacttgaccgaagatgagagagcagagcacaaggatcgtcaggactctcgacctcgcttcgaagttctgattgtggatgaaaccactgaaggcggccgtgatgagctgcataccgatttgttgaaacttcgtcacgcttccgatcaattcatctacgactatgtgattgtcccaaccgcggatgacgcagttgccgctgcgttgaccaacccgaacttgttggcatgcgtgatccgtccaggcttcaccgacagaacccgtcaggtcttgtcccgtgatttgcgttcagccgttgaactggctcaccaaggcaccactgattcccctaccatgccgatgtccccattgaactccgtgcgtcgtgttttgagactggcggacaccctcgcaggcttgcgtccagaacttgatttgtacttgatggcaggcgcacacatcgagtccctggctggcgcattgacccaccgtttccgtcgtgtttttcgtcgagaagaccagttcgagctgcacttgtccttgctccgtcgtgtgcaacacctgtacgataccccattcttcaccgccatccgagaacatgcccgtcgtccagctggcgttttccacgcattgccagtgtcccgtggcggctccgtggtcggctccaagtggatctccgatttcgtggacttttacggcctgaacttgctgcttgcggaaacctctgcaacctctggcgagttggattctctcttggcgccggttggcaccatcaagaaggcacagtccttggcagcccgagccttcggagctaagagaacttactttgtgaccaacggcacctctaccgccaacaagatcgtgcatcaagctattgtctctcctgacgaagttgtgatggtcgatcgtaactgtcacaagtcccaccatcacgcgctcatgttgactggcgcgcgaaccgcatacttggaagcatacccattgaacgatgtcgccttctacggtgctgttcctctgaatcgtatcaaacagctgttgttggattatagagctgcgggccgtttggatgaagtccgtatgatcaccctgactaattgcaccttcgatggtattgtgtacgacccatataaggtcatgtccgaatgtttggcgattaaacctgacctggttttcctttgggatgaggcatggttcgcatttgcccgctttcacccggtcactcgaaagcgcaccgcaatggtggcagccgaacgtttggaagatactttggctaccgacgctcacgcgtccgcataccgagaacagcaaaaacgcctgtatgacccagaaaccggcgcccctgctccagatgaagtgtggttggaagaagatttgttgccaccaccagatgccaccatccgagtctacgctactcagtccacccataagaccctcactgcattgcgccagggctccatgattcacgtgtatgatcaagagttctcctccggagccgaagaggcttttcatgaggcctacatgacccacacctctacctctccaaactatcagatcctggcatccttggatttgggccgtcgtcaggtggaaatggagggtttcgcccttgtccagaagcaactcgatttggctatgtccttgtcctccgcgatcgcacgtcacccacttttgaagaagaccttcaaggtcctgaccgctgcggaccttattccggaagagtaccgagttactgaccgcaccatgcccctgcgtgatggcctttctaccatgtgggatgcctgggcacgtgatgagttcgtcgtggacccatcccgtatcaccgttgaaatctccggcaccggcgtggatggcgacacctttaagcatgaacacttgatggatcgttacggtatccaggttaacaaaacctctcgaaataccgtgctgttcatgactaacatcggcacctctcgatcggcggtggcatacttgattgaggttctggtgaagttggcgggcatgtttaacgacccgcacgaactgcgtaatgaggatgcacttaccgaaccagcagccgtcatgcccccactgccagacttctcagcctttgctcctgattacgctgcagaagtgccagcagatgaccctagcaagcagctcccggatggcgatttgcgtaccgcgtactatgcaggcttgcgtcgtcagaacatcgaatacgtgctcccccacgagttgcgtcgtcgtgtcgaaggcggtgagaaaccagtttccgcaggcttcgtgaccccttacccaccaggctttccggtcctggttcccggccaggtcattaccgcagaagtgttggatttcatgtcggctctggatacccgtgagatccacggttacgattcccgtttgggctaccgtgtgatcctgaaggaagtccttgagtcc

SEQ ID NO: 355 - DNA, 1395 bp, Vibrio anguillarum
atgaacaatatctccttgccaatctacaactccctgaacaatgccaacaagaagttgaagggctccttccacgcattgccaatccagaacttgggcaagaccaaagatgtggtcgtttccgaagacttcaatgcccgcctgtccaaggtcaaagaattggaattgtccttgacctctccgttctttgatagcttgaccgatccatcaaaagccattgatgagtccgctaacatcctgaaggatatgtacggctccgatttgtccttgttcgttacctgcggctccaccatctccaacaagatcattatcgaagcgatctgcaaatcctctgataaggtgctgtgtcagcgaggcgtccaccaatctatctacttcagcttgaaggcacagaactccgatgtcaattatgttcaagacctgatttgcaacgatgacgcgtacatctattccgcagatacccagggcattatcgacgcattggtccgcgccgaagaaaccggcacctcttacaccactctgattatcaacagccagacctatgatggcgtttgcttcgacttgcaagagtttctgccagtggtctgtgaaagagcgaaaggtatcaagaacattgtgatcgatgaagcatggggcgcatggtccaccttcgacccgaagatgaaagaaaagtctgctattcagaacgcgtctaccttgtccaagaagtacgatgtgaatttcatcgtcacccactcagttcataagtccttgttcgcattgcgtcaggcatccattatcaacgtgttcggctccgaggactgccaaaccaaggttgtgggttcccacttccgaaaccatagcacctctccgtcgtaccccatcttggcatccaccgaattggctttgagccacgcgaaccagtacgcagtccaatattccaatcgcatttctgagcagtgcgaatacttgaagtccttcatcaacgatttgtccttgttccgttacttgtccttgaccctggaagaggaatatcttattcaagacccaaccaagttgtggatcacttgtaccactaaattgctgtctggagccaagattcgtgagatcctgttcaacaagtacggtatctacgtgtcccgttactcgcataactccatccttctcaacttgcaccacggcatctccaacgagttgatcggtttgctggcaaatgccctgtgcgaaatcgataagaaatacaagaccaagaacaacttgttgaacatcaacgtgggcgacatcgctaactccttttacatcctttacccaccaggcatcccaatcttgacccctggccagaccatctgcaacaacgttatcaccaagatcaaccaatctatcttcgatgacacctctttgctgatcgtggaaggtaac

SEQ ID NO: 356 - DNA, 2262 bp, Castellaniella defragrans
atgaaatttcgcttcccgatcgtaatcatcgatgaagactacagatcagagaatgcgagcggctttggcattagagcactggcagcggctatcgaagccgaaggcgttgaagttctgggcgttacaagctatggcgatctgtcatcatttgctcaacagcaatcaagagcatccgcgttcatcctttcaatcgatgacgaagaatttgatgaagacagccctgaggatgtggctaatgccattaaaaacttgcgcgcctttatcggagaactgagattccgcaatgaggatattcctatctatctttacggcgaaacaagaacatcacagcatattccgaacgacatcctcagagaactgcatggatttattcacatgttcgaagatacaccggaatttgtcgctcgccatattatcagagaagcacgcgcgtatcttgacagtctgccgccgccgtttttccgtgaactgctggaatatgcttcggatggctcatactcttggcattgccctggccactcaggcggcgttgcatttctgaaatcaccagttggacagatgttccatcaatttttcggtgaaaatatgttgagagcggatgtgtgtaacgctgttgatgaattagggcaattattggatcatacaggcccggtagctgaatctgagagaaatgccgcacgcatttttcatgccgatcactgctttttcgttacgaatggcacatcaacatcaaacaaaatcgtgtggcatgcaaatgtcgcggctggcgatgttgtggtcgtagacagaaactgtcataagtctattcttcacgcgatcaccatgactggcgctattccggtttttctgcgtcctacacggaatcatcttggcattatcggacctatcccgctggaagaatttgatcctgaatccattagacgcaaaatcgaggccaatccatttgcaagagaagccgcaaacaaaagaccgagaattttaacattgacgcaatcaacgtatgatggagtaatctacaacgttgaaatgatcaaggagaaactgggcagcgagatcgatacgttgcattttgacgaagcgtggctcccgcatgcggcttttcacgaattttatgaggacatgcacgcaattggaccgaaccgacctaggtctaaagatacaatgatctacgcgacacattccacgcacaaactgctggccggccttagtcaagcatcacaaattgttgtgcaggattgcgaatcacgtcaacttgaccggaatatctttaacgaagcatttctgatgcatacatcaacatcaccgcaatatgcgattatcgctagctgtgatgtagccgcagcgatgatggaaccgccgggcggcacagcgttggttgaagagtcaattcgtgaagccctggactttcgtcgggcaatgcggaaagtggaaagcgaatttgggaaaaatgattggtggttcaaagtgtggggaccgaatcggctggtcccggaaggtattgggaaccgagaggattgggtccttggctcaggagacgaatggcatggttttggcgatctggctgaaggattcaacatgcttgatccgatcaaagccaccgtcgtaacaccgggcctggatatttctggtacatttgcggattccggcatcccggctgccttagtatctcgttatttggttgaacatggagttgtggtcgagaaaacgggcctgtactcatttttcattctgtttaccattggtatcactaaaggcagatggaatacacttttaacggctctgcagcaatttaaggatgactatgatcgcaaccagcctctgtggcgtgtgcttccagaattttctcgcgcccataaacattacgaacgaatgggattgagagatctgtgccaaaagattcatgaagcatatcggcactacgattttgcgagacttacaacgcgcgtgtatttaagcgacatggttccggcaatgcgcccggctgatgcctacgcacgtatggcgcatcgggaagtcgagagagttccggtcgatagactggaaggcagagtaacaggagttttgctcacgccgtatccgccgggcattccgctgcttattccgggcgaacgattcaacagggatattgttgactacctcaaatttacacaggaatttaaccagcaatttccgggattcgaaacagacgtgcatggtctggcgtatgaaacagatgagcaaggcagaagacattattacgtcgattgtatccgtgaaggtgcg

SEQ ID NO: 357 - DNA, 1539 bp, Brevibacterium linens
atgcaccaggattccccgatgacctctgcttctgaccactccgccttccccggcaccgcaaagacctacgccccctatgctgacgcacttcaggcagcagcgaaacgcgactctctgttcctttccaccccaggtcacggtggcaccaccaccggtatttctgccggtcaggctgagttcttcggtgaacacaccctttccctggacattcctccgttgtttgatggcatcgacttgggtgttgataccccaaaggacgaggcattgcaacttgctgcggaagcatggggcgcgcgacgaacctggtttctgaccaacggttcctcccagggcaaccgaatggctgcactggcgatcggcaccctgggtacgggtgtcgtcacccaacgttctgcgcactcctctttcattgacggtattgtgctggccggccttaacccaggttttgtctctcccaacgttgatgaagtgaacggcattgcccacggtgtgaccccagattcccttcgacacgcaattgcggcacaccctgagaaggtgtctgcagtttatctggtcaccccatcttacttcggcgcggttgcagacgtctctgcactggcggaagtggcgcacgaggcgggtgcagcattgatcattgacgcagcatggggtgcgcactttggttttcacccagatctgccagaatctcccgttaccctgggcgcggatattgtgatcatgtccacccacaagctggcgggttcctttacccagtccgctttgctgcaccttggtgacaccgagttcgcgaaccgtctggagcccgcattggcacgtgcttttatgatgaccgcatctacctctgaaaacgctcaccttatggcatccatcgatattgcgcgacgagatctggtcaactcccaggatgcgatcgcagattccttggacaacattcgtcagattcgtgcgcgtattgagggttctgaacactatcacttgctgtctggcgactttatgaaccacgcggacgtggtggatattgacccctttcgtttgccaattgatattacctctaccggtttggacggccacgcggtgcgtaaacgtcttaccgaagagtttgacatcttcgcagagatggcgaccgctaccaccatcgtggcactgattggcatcggcaaatcccccgacttgggccgtctgtttgatgcgctggaccaaattcgtgctgagaactctggcaccccaggcgcgggcaccgcagagtctgcaacccgtgcatccggcatcccggcgctgcccaacgcaggcgaactggtggcgctgccacgtgacgcatactttgcagaatctgaactggtgccagcagcagaggcgattggtcgcacctctgtctcttcccttgcagcgtatcctccaggcattcctaacgttcttcctggcgagcgcattaccgcggaaaccgtggaatttctgcaggctgtggcggcatctccttctggtcacgtccgaggtggtgttgatgctaccctgtccatgttccgagtcttgaaggat

SEQ ID NO: 358 - DNA, 1449 bp, Bacillus subtilis
atggttaatcttaaccaacaggatcttcctttagtgaatgccctgaaagctcttgcccaacagccagacacaccgttttatgcaccgggccataaacgaggccagggaatctcaccgagctttaaacaatggctgggacctaatcttttccaggcggatctgcctgaattgccagaactggacaacctgtttgctccgacaggcgcaattgcgaaagctcaagaactggcagcggatttgtggggagcggaacatacatggttcagtgttaacggctcaacagccgggattgtggctgccatcttagcaacgtgcggcgatggcgataaaattctgcttcctcgcaatgtccatcaggcagcgatcgctggcattatccacgccggagcagtcccgatttttctggaaccagaggtaaacccggattgggacttggccctcggcgtcacagaagagacgctgtcaaaagcacttcaagaacatgatgacgcgaaggctgtatttttattgaatccgacatatcatggcgttgtgggcgatctgcagaaactgattaaactgagccatagagtcaaccttccggttattgtggatgaagcacatggcgcacattttgccttccatccgtctttacctcgcccagcactggaacttggtgcggatattgtaatccaatcaacacataagatgctcggcgcactgtcgcagtgcgccatgattcatggccaaggaaatctgattaacccgcctagaatctctcaatgtttacagttgattcaatctacgtccccgaattatgttctcctggcatcccttgatgacgcgcgtcaccaaatggctaatggcggacgggagaaaatggcggaactgttaaactttacattacattaccgtcaacagctgagccagattcctggccttacactgctggaaatcacgaagccgctgccgggcgcactgattcttgatccgacccggatcactgttgatgtaacggcttggggcatgagtggatttgaagttgatgacctgcttcgagagaaattccaaattaccgccgaacttccgactttaaggcagctgagctttattgtgagcatcggcaatcaagcacaggatctgggacatctgctggaagcactgacacaacttgcaccgacgaaccctcaacagccattccatcttacgttaccggttctgccgggcacaattttggcaatgacaccgcgcagagcagcccatgcagcgcagaaatcagttaccgtgaatgaagcgattggcaaaatttcagctgggctcctgtgtccttatccgccgggcattccggttctggttccgggcgaaattatcaccccggaggccatcgcatttttaactgaagtgttgaatctgggcggcacaatttcaggactggcgtccgaagaactgacacatttggctgtcgtaaac

SEQ ID NO: 359 - DNA, 1512 bp, Bacteroides pectinophilus
atgttaccgacaaattcaggccaaaagactttcgataacgaggatgatctttttgacagattagaaaactactgctcaagcggctacattccaatgcacatgccgggacacaaacgcaatacacagcttattgatacgggcaacccgtatggcattgacatcacagaaatcgatggttttgacaatctgcatcacccggatggctttctgaaagaagcgcaagagcgtgcagcgcagtattacgatgctgccaagacgtggtatctggtaagcggttcttccattggcctgatgagcgctatcctgggcgttacatcaagacatgatactgtgttagtcgcgcgcaattgccacatttcagtctataacgctatctacgaaaatgaactgaacccgcaatacatctaccctaagttcgttgataacctttggatttcatcaggaatcttaagcaacgacgtagagaaagcgcttaagaattgtgttaaaaacgaaaagggctcaggaaaagtaggtgctgttattatcacatcaccgacgtatgaaggcaatgtttcagatattagagctatcgccgacgttgtgcataaatatggcgtgcctcttattgtcgatgaggcacatggcgcacattttaaatactcggaaaagttcccacaatcagctctcggtctgggggccgatgtcgtagttcaatccttacataaaacattgccgtcactgacacagacggcactgcttcatgtaggccgggaagcggttaacaaaaaacgcctcatcgctgatattgacagatatttaaacatgtttcagtctacgtcccctagttacattttaatgggaagcattaatcgctgtatccgtttgatgaactctgaaagaggcagagcagtgatggataactacacaaaggaactggaaaaactgagacgccgtttagaaaaattgagagtgatcaaactggcaaaatcagatgacattagtaaacttgtcatctacacagaagatggctgcctgcaaggaaagcagctttacgacattctcttgaagagatatagaatccaactggaaatggcttctttgcgctatgtcattgccatgacaggaccgggcgatacgaaagaatattacgatcggttttacgacgccttgtgtgagattgataaagaactggcaggtagaagcggcacatcagacatcggctcaagcgaaacggtgaatattagccgtcctgtcatcaaaatgaatctgtatgatgcggtgaactgcgaagacaaggaatcagttgaataccatgatgcatgcggcagagtttcagcatcaacagtctgtatttatccgcctggtatccctcttgtatgtccgggcgaagttattaatcgaaacatgatcgatacagtagacaacgccttccgtgatggactggacgttatgggcctggaaggactggaagcaggtctttgcggggcagcgccggatgaacgtaaaattgtgaagatcctttgtttacgg

SEQ ID NO: 360 - DNA, 1407 bp, Anaerobranca californiensis
atgaaaattaaaaaactgcaaaatctgtatatctacaacaagaacaacaaaaaacgctacatcaagttccacatgccgggaaactacggcggaaagaaccttaacaagaagttccgcaagtatatgccgtttttcgaaacaacggaagtgtatggcacggatgactaccataatccgcaaggaatcattaagaaagcagaaaaatcaacagccaaattgtttaactctaaccactgcatctacctcgtcaacggctcaagctctggaattatcgcagcgattagctacctttttcgtgaaggagatcagatcctggtttcaagagattgtcataaatcagtcatctatggcctgattctttctggagctgagccggtattttctgaacactccggtgcctcaccgctggattatcaaggcattcaacaggcaattaagaaaattgaacgaatcaagggcattatcctgaccacaccgaattattacggtattgggaacaaggatctcaaattgatcgtacagctttgcaacaagtacaagatcaaactgcttgttgatgaagcacatggctcacatctttattttacagacctgaaagtgtaccttgcaaacacgtgtaaagcggatctcgttgttaattcaacccataagaaccttactggtttaacccaaacaggcgttatcaacatcaacgcagaggacattaacttgtccgaactgcgtaaacacatttcactgacaacatcaacatcacctagctacatcctcttggcaagcatcgcgtattgcaccgagcaatacactcagatcggtgaaaagattctgcagaagacgattaagaaaggcaactacatgaaggaactgctggataagtacaagatccggtacatcaaggaaaaggatttaaattcaaaccaatatttggacccgacaaagatcacgcttttatttaaggataacaagaaagcaaaagaagtcttcaagcagctcatcaagaacggcattatccctgaatttttggccgacaataaaatcctgctgtttatcaactacaaaatttcaaagcgagaactggtaaaaaccgctgccattctgaaaaggttctcgacggaagaagaagatattctctactcccaggaaaactgtttcagaatccgcaacacaggtgttttgacaccgagagaagcattttactctcaaaaggaaaagattccgctgaagaaagcaaagggaaaagtcgtagttcagccaatcacaccgtatccgcctggcattcctatcctgtttccgggcgaagttgtcacagaggaaatcatcaagtaccttaaaaatagcaacttttcatcaattcatggcattgagaatgggatgatcgaagtagttaaggataagtttttcgatgacaaa

SEQ ID NO: 361 - DNA, 1425 bp, Salimicrobium jeotgali
atgacgcgacatgagaaagccccgttatgggaagcagtcaagcaatatagacatggcaaagccggaagctaccatgtgcctggtcacaaaaatggcacagtctttgatacggaagcaagagaagtttttagagaagttctggaaatggacacaacggaaattcctggtttagatgacttgcattcaccgagaggcgcaattaaagaagcagaagaactggcacgtctgtacttcaagtctgagaaaacaagatttctggtgaatggctcaacatcaggaaaccttgcgatgattttagctgtctgcagacgcggctcaccggttctggtgcaacggaatgctcataagtcaattctgcatggcatcgaactggctggggccaaacctgtgtttcttgcgccagaatgggatgctcggaccggtaaatattcaagcctgactccggagagagtccgcgaaggacttagacagtttccggaagcagtcgcggtaattgttacatatcctgattactttggccatacgtttaatctgagcgcgatcacgtctttagtacacgaggctggcaaaccagtgcttgtcgatgaagcacatggagttcacttttccttacatagagatttccctgacacggccttggcagcgggagcagacatcgttgtgcaaagtgcgcataagatggctccggccatgacaatgggcgcttatttgcacactcaaggcccgctggttccggaaaaacgcttgagctatatgctccaagtcgtacaatcatcatcaccgtcctacccggttatggtttcactggatctgtgccgtcggtatatggccatgtggaaagaagatggcctgcttacatttttagacgaagtaagagaagaactggatgcgtgctgtgacggatgggaagttcttccagcttctccgcaagatgacccactgaaggtagaacttaaaccgagaagagttgatggttttacgttagcgtccatgctggaagaacaagggatctatgcagaaatggcgaccaatactggcgtattattgacatttggattagaacgcccggagagctgggaaaacgataaagctgccttctatgaggtcgcgagactcctgcaaaaacgcgaaaagcatgataagatcatcgacaacaacatctcatttccgcctgttcaacagctggatgctcagtacgaagagatggaagaccttcaacagacatgtttgccgctggaaaatgccgtagaacatattgcagcggaagcagttatcccgtatccgccgggcattccgctgatccttaaaggagaacgtattcggcaagagcaggtggaacatattagaaccctgatcgaaaacaaagccgtgtttcaaaatgagaacattgaaaaagcagtcacaatcttccaagaagaatggtct

SEQ ID NO: 362 - DNA, 7470 bp, Plasmodium malariae
atgaactcagtcaatgactccatgtacagtggagatacaaactctctccatgtaaattccctgtatgaaaataacccggataaaagcgttaagaacatcaacgctgtgaacgactacatcacatcaagcaacgccatgtctgaagaagcagaaacggcagcgggaaatgatgaactgattccgaatagctcatcaaaccatatccacagccaatataaacatcgtcaccaatacaagcagtatcatcaatacaatccgcataatcagcacaaacaacatcaccagtacaagaaactgcatccatacaagcaataccaccaggaaaaagaactgccgaagtaccagccactgccgcaatatcagcatagcacacaataccagggctctaaaccgcattcccaaagtcagctgcacgatggcggcaaaaaacgcagagaaaaaggaaaggtggagcgcaataaatacgataagattgaagaactggaaaagtatatcaacatcaacaacgccacaaacgtctgctcattgcgtatcaaactgtgggaagcacttatgttatacgttaacaacctgaagattgaacttgtgtacttcatcatctactgtcttgaagagatcgaagtgtattggggcgaagaagcaacggacaatcttcgggatattatcaacctcatcaacgataagaagtataaagaagtcttaaacaagatcggagaaacactgtcatcactgtcagttacaacgggtaaaaccactgaagagaatccgtttttctatacgctgattgtcagcggccgtcgggatgaaaacaacaataacaataacaacaactcaaacaacaactacaactacaacaataacaatagcgatttaggatgcgaattgaacaaaattctccattacgagcacaatcgtttgtcgaaccaatcaaacaacaagaaactggaatacaagatcatcgaagcatcaaacgccaaagaagcactgctggcgtgtttaatcaatcctcagattctgtcagttgttctggttgataacctcacaatcgatgaagagaaagtaaaggaacgggactactacaagttcaacgaggataacatgctgaacgctaattgcgccaatagctcttatttattgaactgtaatcttcaaaacaatacgcagatggtgatgaaaaatccgttaaaccataatggcatgatgcactcaggcggcgttacaacggtacaaaactctaaagatgtcctcctgattggaaattcaatgttgcctgaatacttaaacaacaacaacgtcaacatcaatgaaaactcaaatgttagatcactgagatcactgtatatcaaacgcaattacaagttcgacatcggcgattttgttattggatatgaacagcttgtgtctgcaccgctggaaaagatgaagaaaggcttcaacatcctggtgatccttatcaagtcaatcgcatacatcagatcatcagttgatattttctgcgtatgtacatcaatcacactggataaattgcattctgtaaacaacaagatcatcagaatttttaccactcatgatgaccacagtgacttgcatgaatcaattctggatggagttaaaaagaaaattaagacaccgtttttcaatgcgcttaaagcgtatgcagaaagaccgattggtgtctttcatgctttagccatctctaaaggcaattcagtaagaagatcaagatggattcaatcacttttagatttctacggcgttaatctttttaaagcggaatcatcagctacgtgcggcggacttgacagcttgttagatccgcatggctcactcaaagaagcccagattatggctgcaagagcgtatggctcaaaatactgctttttcgtgacaaatggcacatcatcatcaaacaaaatcgttatgcaagcgcttgtgaagcctggcgacattatcttagttgatcgtgcttgccataaatcacatcactatggatttgtgctgagccaggcgcttccgtgttatttagatccttacccggtttcaagatatggaatttacggtgctgttcctatctacgtgattaaaaaatcactgctggattatcgtaactctaataaattgcatctcgtcaaactgttgattttaaccaactgcacttttgatggcatcgtttacaacgtgaagagaatcatcgaagagtgtctggccatcaaaccagacctcatttttctgttcgatgaagcatggttcgcgtatgcatgctttcatccgattcttaaatttcgcacagccatgacggtagcagaaaaaatgcgctcaaaggagcagaaaagaatctactacaaggttcataagaaactgctgaaaaaattcggaaacgttaaatcactgaaccaggtatctgcggataaacttttaaagacacggctgtatccgaatccttctgaatataaaattcgagtgtacgctacccaatcaatccataaatcccttacatcactgcgtcagggctccgtcattctgatttcagatgacaatttcgaaagccacgcgtacacgccgtttaaagaagcatattacacgcacatgtcaacatcacctaactaccaaatcttggccacactggatgcaggacgggcgcagatggaactggaaggatacggtcttgttgaaaaacaaacggaggcagcgtttttaatccgaaaggaattgtccgaagatccgatgatctcacgttacttcagaattttaaacgcggaagacctgatcccagattcacttaggcagtgcgctgtcagctacatgaagcgcaaaaagaaaattatcaaggaatacgattcatcagattcaagatgctcagcgaatgtcacatatagctgtgtatctaacaataacacaagaggcattgttgacccgagcgattctggcaaatattacctgtctggagaacaaaatgtcgtacattcagttaacgcatcatcatttgaatgtgtgcgcggcacaaatggcgcaacaaacagcaaccatacaaacaactccacaacatcaaacaaccgggcgaactctcctgctcgaaattgccatgttaaatcaccaacatcaaactaccacacaaataactgtccgacgtcaattcatatcggcacatcagttatgctttcaaacacaaattcaaacaacatcgtccagggaaacaacaacaacaacgtaaaatcttccaacaatagccctcgttctgcgttaaatggcgttgctgccaaaagcacagaaattgtggagtcctatacatcatgcaatatctactcggaagactcagattaccaaaaagtttcaaaatcaggaaacatcaagaggtacattaagaaaaagaaaaatcagaattgcagagaagccccgtgtgtcagctatgatggtagcaatttttctggggcaaactctgaaaattgcgagaactgtgaaaattccaaaaattcaagaaattcaagaaattcacaaaatagcagaaactctcgcaattcccaaaattcacaaaattcagaaaacgagaacctgtcatttcttgaaaatagcaacaacaagagatacaacaacagctatggttattcatcaggcctgaagaattttctggaatacttcgaatgttcatggttaagcgaagacgaatttgttcttgatccgaccagaattacactgtttacaggatactctggtatcgatggggaaacattcaaagtaaagtggcttatggacaagtatggcattcaaatcaacaagacatcaatcaactccgttttatttcagactaacatcggcacaactggatcaagctgcctgtttctgaaatcatgtctgtcactgatttcacaagaattggatcagaaaaaatcactgtttaacgaacgcgacctgaaccaattcaacgagaacgtcttcaaccttgtatctaactacatcgatctcagcgaattttctgaatttcatccgctgtttaaaaaacgctacacagaccctaagatcttcaacaaagaaggcgatattcgtaaagcattttacttggcgtatgaagaagattacgtggaatacatcttgctctctgatcttaaggaaagaatccgccagaatgagatgattgtctcggcatcatttattatcccgtacccgcctggttttccagttctggttccgggccaaatcgtttcacaggaaattgtggattatttatccggcctgtcagttaaagaaattcatggttacgacgagaatatcgggtttagatgcttctacaacttcgtcttggaatacttctacaacatggtaatttctgacccttattccctgtaccaaaagatcgataaggaaacgtatgaaaaactgaagcacatgagcttgtctaaaagaaaatcactggaatcagtttgttacctctacatctacgataacgaatctaataaaatgaagaaagtttatctttgcagtggcaatgtttcaacagaaaacaataccattgtgtcagacacctgtgatgaaatcactcagaatcatgcgagacgcagctacaacaagaaaggcaagcaaacatctatctacgaaaacttctcaaaatcagctcagaacgccggaaatgcatcaggcgttggcaacgtatctggtaaaattggaaacatcatctacggcgataacttcaacaactgcgctaatggaaaagacatctgtcatcacctgtatggcaaagaagaagaaggctttttcgacgttaacgatgaaaatgcgtttggcaacgatgtgctccatctgaatcactatgctattaaaaatccgctgaagaaaggcacaacggaaacattcattaagaaaacatgcaaccaaaaatcttcctggaaggaaaagatcacggataagtatcatggcacaccgaacggaacacgtcgggacaagcataacgttctgtcaagcaaaaagaaagaaaacggtagaaagtgtaagggcattcaagttaataacaacaataataacaacaacgtgatcctcatcaactcggaaagctatgatcatgatcagaaagttatcgacctggtggatacaccggaaaaatcaaacaagaattatgagtgccatgaacacgacggacgggataatgatgacgatgacgatcgacactcaggcggcggctcaaactacaatagagactcaagcaacaattcacataatgtggatcgtaaaagatatgttgtgggcacggacaaacatagcggatcttccaacacccacaatgttggcacagataaacattcaggcggctcaaacacacacaatgtgggtattgacaagcactcaggcggctcaaacacgcacaatgtcggcatcgacaagcattcaggcggctcaaatacacacaatgtaggaacggacaaacactcaggcggctcaaatccgcataacgtcggcacagataaacatagccactctggctcatcaaacaataacaaacgtagccttgaacgcaaaaagaaaagaaacgagggcaactacatgtccctcagttacaaggcaaacatctacggtcataaggtcgtattcaacagagggaataacaataacgacgatgcgaacgtaaaagcatataacgaaaaggatggcaaaggcggcgaaagaaacaacaactgcacattctacgataagaacgttaacggaatgaaccgagaaagatcactgaagaacatctcctacatgagtaacatctcggaaatcagaggaatgaacaacgttaacaacgtgagaagaaagaaccgcattgatgaaggcaaaaaccgtaatatcaagggaacagacgattctgattatctgctttccgaagtgacggccaatatgagcaaaaacattggcccgatttcagatatttactccctgaagaaaatttcaaaactgaaccggtctgacgatggaaagtacgaaaattcattgtcagattacgtcccgaaactgaaatcatcaaacatcgtcatctacaacaaggttaagaaaaatgcattattgatgggtagaaaacacatgagtgatggcaaatcaagaaacaaccatcacagaaaaaattcccacatgaaccaaaaatcaaacaaggactacgtctactactcagattcatcaaagaaaattaacgaaatcatctacatgaaacggcaggacggcgatctgacagaggaaaacgcgatcgttaaagaaaacctcaatgaactgaatagcaacctgttttattcaaacggaacgggtaataaaggcggcgatattaaaggaccggagaaaaattcatcaaacaattctggtacgctgagcggcacaaacaatggcaacaatagcaattcaagcatccaaaactttgccaacgtgaatgaaaaagcaggcggcattacattcaccacaccgaatatcgtcgcggacgaatattgcgataagaaagaaattccgatcaaaagaggaaacaatagcggtgataacaatggcctgaatagcggccttaattccggatataacagtggccataatggagttcacaactcttgtaacgattcttccaacaagccgatcatcaacgaaggcacaggctataacaattcataccatagcgaccaggatgctaacaagtctaacgaggaaaagtacaagtcaaacggtcttatcaggcctaacaatttagaaagaaacatcatcttgggcaacgaaatcatcgtagagaaggataacaacttgagctaccgtaacatctctggacataacctgaacgaaacaaatagctatgtttatgcgaacgatggcacaatcgctgaaggtcattatgggaacaataacatggctcggggttccaatatcgggtgctcagacgatattgagggcagcgaagacatcgaaggcggcgaagatattgaaggcggcgaagacatcgaaggcggcgaagatattgaaggcggcgaagacatcgaaggcggcgaagatattgaaggcggcgatgatattgaaggtagctacaacatcagatcatcatcaaacatctacatgggcaattcaaatgcgattagcgatgtcgctcaagtaagcggctctgttaacgacgccaatatttcaaacctgatgggacatgttaaagatgaaatcggcttctgtggaaagaattttctgtacagcgaaaacgaactgaaaatgaacgcactgctgcgcgaagaagaaaaagataaatcaacaattcgtaaccttaacactctcaacaacaacagctacatcaacaatcttatcacaaacgttgatgatgacacgttcatccataaagaaggaaatttctttctggaatgcacattgacgaactctgaaatgaattgtagctcttttgagatggatatgtcacttaacaacatttacccgaatggcggcgaacatgttaaacagcaccgcaagtatgatgacgatctgaagaaagaattt

SEQ ID NO: 363 - DNA, 1941 bp, Gamma proteobacterium NOR5-3
atgccggaacaccgtctgccctcttgccatgcaatcattgtgtccaccgatgacgcctggcgagataccttgtgtcagcgtttggtggaattggaagcacgtggcggcgaagaacacccatgctgtgagctttccatctccgcactcgccacccctgatttgctgcttgaacaggctcgtgcggacggcgctttgcaatgcgtggtcctggatgcagcctcccttaccgacgtcactgcgattgttacccgtctgcaccgtgtgcgatccgaagtggatgttttcatcgcagtgtccccaggccaggcaccagcagatgacaacgctgagctgatcgaccgcgatgacacccgtgcagaaattctcttgcgtcgattgcgtcgtgcaatcgcgaagcgtgcttccaccccattcgcggatactctgcgcgaatacattgatggtgctcgtgacgcttggcacaccccaggccactcctccggcgatggcttgcgagagtccccctgggtcgctgacttctatcgcatgatgggcgaacacgtttttaacgcggatttgtccgtgtccgtgcaggaacttgactccctgcttgagccatctcacgtgatccatgctgcgcaagatctggcagccgacgcattcggcgccaagcacaccttctttgtcaccaacggcacctctatggcaaacaaggtcatcgtgcagcacgttctcggtaactccggcaagatgttggttgatcaagcgtgccataaatccgtgcaccatgctgcgatcatgtctggcgcagacccagtgtacctgcctgcatccgtgaatgaaaccttcggcctttacggcccagtgtccaagaagaccatctatgatgctattgctgcacacccagatgctcgtctcttggtccttacctcttgctcctacgatggcttttactatgacttggagccaatcattcgtcgagcacacgctgcgggtatcaaagtcttggttgatgaagcatggtacgcacacggctatttccatccggatttgcgtccatgcgcattggaatgtggtgccgactacgttacccagtccacccacaagatgctgtccgcattttctcaggcatccatgattcatgtggcagatcctcaattcgacgaatcccgtttccgtgagcacttgaacatgcatacctctacctctccacactacggcttgatcgcatccttggatgtggcgcgtaagcagatgtctatggaaggtttcacccgtttggagcgatgcattacccacgcccgtgagctgcgtcgtggcatctcccaaaccgaacgttttcgagtcctggaacttgaggatatgcttccagactccctcaaggatgacggcgtgcgtttggacccaaccaaacttactatcgacgtgtcccgtgcaggttgttcagcacgagccttgcagaaggccctgtacgaaaaacactccatccaagtcgagaagattacccataacactctgtctgtgcttgtcaccctcggcaccactcagagcaaagttctgcgtctgcttaatgcattgcgttccctggcccgagaaatcccagagaagcctctccgattgcaaccaccttctgtcttgccggcaatcggcgacatcgttgcacgtccacgtgaagcatacttcggcccatcggaggatctgcctctttccgacgaagcacacggtatcaactcaggcttgattggccgtacctctgccgaccaggttgtgccatacccaccaggcatcccagttttggtgcctggccaacgtatctctgaggatgtgttggattacttgttggatttgtatcacggtgacagcggaatcgaattgcacggcttgatgcgccatgaaggccgtgcaatgttgcgtgttaccggcaatactgatgacgaacactcagtgaccgcatccaccgat

SEQ ID NO: 364 - DNA, 2148 bp, Legionella fallonii
atgaacgacatcttgattgtgtacgctaagaaaattcaggactacaagaaacacttcgtgtccttgttggaagattgcctgatccaaaaggactacgaactgaccgtctgtacctctttgcgcgatgcttatgaggtgtcctctctgaacccacgtatcgtcgcgattctttacgattgggatgacttcggcttctccgaattgcaccattttgccgaccacaacaagttgctccccatcttcgcaattgccaacaagcatacctctgtggacatcgagcttcgtgatttcgacttgaccttggatttcttgcagtacgacgcatccttgctgaaggagtctttcaaacgtatccttctcgcaattgaaaagtaccgacaagccatcctgccacctttcaccaaagcccttatgtcttaccttgatgaattgaactacagcttttgcaccccaggccacttgggcggcaccgctttccagcgtaccccaattggcgcgaccttttacgatttctttggcaagaacatcttctccgcagatttgtccatctccattgaagagttgggctccttgctgaatcactccggcccacaaggagaagctgaagagttcatcgcgcatgtttttggctccgatcgctccctgattgtgaccaacggcacctctacctctaacaagatcgtgggcatgtactctgctacctctggcgataccgtgatcgtggacagaaactgccacaagtccattgcgcagttcctgatgatggtggatgttatcccaatctacttgaaacctatgcgtaacacctacggcatcttgggcggcatcccagaatccgagtacaccgaagaggctatccgagataagattgcagagcacccggacgccaaaacctggcccgtttacgcagtgatcaccaactctacctacgatggtattttgtatcaggtggaaaagatccagaatcaactcaaaattccgcacttgcacttcgactccgcatggattccatacaccaagttccaccctatctacgccaagaaatttggcttgtccttgacccctgataaggagcaggtcatctttgaaacccagtccacccacaaacttctcgcagccttctcccaatctgcaatgatccacattaagggtcattttgatgaggacatcctgaacgccaattacatgatgcacacctctacctctccattctatcctatcattgcatcatgcgaagtgtccgctgcgatgatggccggcaacaccggttactacttgatcaacgatgctattgagttggcgctggacttccgtaaggaaatcattcgactgaagaaacagtcctccgattggttctttgacgtttggcagccagctcaaatcaagcacgcggagtgtttccctttgaaatttgatgaaacctggcatggctttcaccatgtctccaacgattacttgttcttggacccaatcaaggttactattttgttgccaggcatcaagaacgacaccttggatgactggggcatcccagcttcaattgttgagcagtacctggaatcccacggcatcgtggtcgagaagaccggcccttattcgatgttgttcctgttttccctgggcatcacccgcgcaaagagcatggcattgttggcagccctcaacaagttcaaacagttgtacgatgaaaatgcgtctgtgaagaccttgctgccaaaattgtaccaagaacaccctgagttctatgaacgaatgtccattcagaccctgactcaaaagatgcacgatctgatcaagaaacataaccttccatccatgatgtaccacgctttcgactctttgccgcaggttatcatgaccccacaccgcgcgtaccaaaagctgatcagaaaggaaattaaattggtgccactggagcagcttaaaggcgaagtctgcgctgcgatggttctcccttacccgcccggtatcccgctgattatgccaggcgagcagatcaccgatgcatgtcacccgatcttggatttcttgctcatgttggatgacatcggtcaggcattgccaggcttctccactgaaatccacggcgtgatcaccggcaaggatggcaaacgttacgtgcaggtcatcgacggtctgtactcctcc

SEQ ID NO: 365 - DNA, 2355 bp, Betaproteobacteria bacterium MOLA814
atgagacaggtgccgtgcggacataccctggtcttttatactgaatggcttgtacgttcactgcttgatacaaacatgaagttccggttccctatcgttattatcgatgaggactttcgaagtgaaaacacatcaggtcttggcattagagcactggcacaggcgattgaatctgaaggcgttgaagttctgggcgttacatcttatggcgatttgtcccaatttgcacaacagcaatcaagagctagcgccttcattttatccatcgatgacgaagaagttacgcaaggaccggatattgaccctgcagtcgagagactgcgcggttttattgaagttgtgagacgcaaaaatgcggatgtaccaatctatgttcatggagaaacaaagacatcaagacatattcctaacgatgtgttgcgggaactgcatggctttatccacatgttcgaggatacaccggaatttgtcgctcgacatattatcagggaggccaaatcctatctggaaggcattcaaccgccgtttttcaaagcactgctggattatgcggaagatggctcatactcttggcattgccctggccactcaggcggcgttgcatttctgaaatcaccagtgggacagatgttccatcaatttttcggtgaaaatatgctccgcgctgatgtgtgtaacgccgtcgaagaactgggacaactgctggatcatacaggtccgatcgctgaaagcgagagaaatgcagcgcgcatttttaacgccgatcactgctttttcgttacaaatggcacatctacgtccaacaaaatggtatggcatcacacggttgcaccgggcgacgtcgtagttgtggatcgtaattgtcataaatcagtattgcacgctattatcatgaccggagccattccggtttttctgaaacctactcggaaccattatggtattatcggaccgatcgctcagagcgaatttgagcctgaaacaatccgtgaaaaaattcggaataacccgcttttaaaggattacgacgccgatacagtagaacctcgtgttcttaccttaactcaatctacgtatgatggcgtactttacaacacagaaacgatcaagggtatgctcgatggatatgttacaaacttgcattttgacgaagcatggctcccacatgctgcctttcacccgttctatggcacataccatgcaatgggcaaaaatcgtgaaagaccggaacatgcggtcgtatacgtaacgcagtctcttcacaaattgctcgcaggaatttctcaggcgtcccatgtgttagtccaagactccaaaacagttaaactggatacgcatctttttaacgaagcgtatcttatgcacacatcaacatcaccgcaatacgctattatcgccagttgcgatgtggcagcggctatgatggaaccgccggcaggcacagcgttagtcgaagagtcgattctggaatgtcttgattttcgtcgggctatgcggaaagtcgccaaggactatgggaatcaggattggtggtttaaagtgtggggaccgaaggtcaacgaattgtcagatgacacggacgagggcatcggagaacctgctgattgggttctgggtatggggaaagacaataactggcatggctttggcgatctggctgatggattcaatatgcttgatccgatcaaagccacaattgtaacgccgggactggacgttgatggtacatttgcagaaacgggcatcccggcgagtattgtgaccaaattccttgccgagcatggggttgtggtcgaaaagactggcttatactcatttttcatcatgttcaccatcggcatcactaaaggaagatggaataccctgcttactgcacttcagcaatttaaggatgactatgatcgcaatcagcctatgtggaagatcctcccagaattttcaaaggcgaacaaaaagtacgaacgaatgggattaagagatctgagccaacatctgcatgctatgtatgccaaacatgacatcgctagagtgacaacggacatgtacctttctgatcatacaccggcaatgacgccgggagatgcatttgcgcacatcgcgagaagaaccactgaaagagttccgattgatgacttattgggcaggatcacaacgtcattaattacaccttatccgccgggcattccgctcctggttccgggcgaagtttttaatcagagaatcgtcgattacttgaaattttcaagagaactgagcgcgcaatgtccgggctttgaaacagatattcatggcatcgtcggcattctggatgacagcggcgtaaaaagatttttcgcagattgtgttcgcgcgacg

SEQ ID NO: 366 - DNA, 6225 bp, Plasmodium vivax
atgaactctgccaacgacgcaatcttctacggtgacaaaaactccgcccactataacgacctttccgaatctgctgctgatcgctgcgtcaaaaacggtggcatccagaacgactacatcatgtccaacgacgttacctctgaaggcgtcgatatggcggttgagcccggcgaaaacggtgcgggcaacgcggcgtacctgcacaccccattgcaccagcactctccaccccaccgaggcgagcgtaagaagaagcagtacggcaaagcggaacgtgataaatatgatcgaatcgaagagattgaaaagtacttgaacatcaacaacgcgaccaacgtgtgctctctgcgtattaagctgtgggaagcgctgatgttgtatgtgatcaacgtgaacgcggagttgatctattttattattaactgtctgatggaagtcgaagtctactggggcgaagaggcaaccaacaacctgcaggacattctgtctcttattaacgacaagaaatataaagaagtggcgaacaagattggtgagaccctgtcttccttgtctgtgaccaccggcaaagcgaccgaggagaaccccttcttctacaccctgattgtttcctctaagcgcgatgagaactccaactcctacaactctgatctggcgtgtgagctgaacaaaattctgcagtacgagcacaaccgtctttccaaccagaacaacaacaaaaagcttgaatataagattatcgaagtttctaacgcgaaagaggctttgcttgcttgcctgattaactctcaaattctgtccgtcgttttggttgataacttggcaatcgacgaggattataagcgtgaacgcttcgagttctacaacttcggtgaggaagcctctgtgaacaagtgtggcgcagcgtccccttatggtctgaactgtggtatggtcggcggcggcatggtgggcggtggcatgatcggcggtggtatgattggtggcggtatggtgggcggtggtgcgcaaatgaagccagcctttacccactctgcccacaacggttcctcctctaactctcgtgatgcaatgcgcaacatgatcttgtctaactaccgtggttgttctggtaacaacggttccgtgtgtaacaactactgcggcggccactgcgcaaacaaccactactcttctggttctaccgtgcttaacgaacaccgtaaaggtgcgaacctgcttatgaaagactataagtttgacatcggcaacttcgtccttggctatgagcaactggttgcagcgcccttggagaagatgaaaaagggcttcaactctttggttatccttattaagtctatcgcgtatatccgttcttccgtggacattttctgcgtctgtacctctatcaccctggataagttgcagtccgttaacaacaagatcattcgtatcttcaccacccacgacgaccactccgacttgcacgagtctatcctggacggcgtgaaaaagaagatcaagaccccatttttcaacgcgcttaaagcgtacgcggaacgccccatcggtgttttccacgcgcttgccatttccaaaggcaactctgtgcgacgatctcgttggattcaatctttgttggacttttacggtgttaacttgtttaaagcagagtcctctgctacctgtggtggccttgattctctgttggacccacacggttccctgaaggaagctcaaatcatggctgcgcgtgcgtatggctccaaatattgcttcttcgttaccaacggcacctcttcctccaacaaaatcgttatgcaggcgttggtgaagcctggcgacgtgatcttggtggatcgagcttgtcacaaatctcaccactacggttttgtcctgtcccaggccttgccgtgttatctggacccctatcccgtgtcccgctacggtatctacggcgccgtgcccatctatgtgattaagaagaccctgctggaatatcgcaactccaacaaacttcacttggtcaaattgatcattctgaccaactgcaccttcgatggcatcgtctataacgttaagcgtgtgattgaagagtgtcttgcaattaaaccagacctgatcttcctgtttgacgaagcgtggtttgcctacgcgtgcttccaccccattctgaagtttcgtaccgcgatgaccgtggcggataaaatgcgcaaccacgaccaaaagatgatttacaacaaggtccacaagaaattgcttcgtaagttcggcaacgtgaaatccttgaacgaagttgccgcggaaaaactgttgaaaacccgtctttatcccaaccccgcagagtacaaggtccgtgtttacgcgacccagtccatccacaaatctctgacctctctgcgccaaggctctgtgatccttatctccgacgacaactttgagtcccacgcctataccccattcaaggaagcctattatacccacatgtctacctctccgaactaccagattctggcaaccctggacgcaggccgtgcacaaatggagctggagggctacggccttgttgagaagcaagtggaagcggcatttttgatccgaaaggagctgtccgaggacccgatgatctctcgttactttcgaaccctgaacgctgaggaccttatcccagattctcttcgtcaatgtcacaacatgtatatgaagcgtaaaaagaaatgcaccaaggaaggttattcctctgattctaaaggctctgtgaacggcacctactcctgtgtgtctaacaaccaaggcaaaggttctaccaccaccaaggaacaacgttctcgtggtctgcgtaaggcgcgccgtggcggttctgtcaccaagtatgaacaaccaatccagtcttctaacatctcttctcacgaatgcgtcaacgacaccaacggctgttctaaccacgttgtccgtaactctcttatgctgggcgattttaccaacaacaacaactgcaccgttgagggcggtttgaacgactacggcaacggcgatccccgcggcggcgtgaagctgtcccgtcgccgttctcgtcgcgacgaacgaaacggcaaggaaggtggcacctctggtacgatggacgattctaacaacggctctatcatcatgaactctgagaacgataacctttcttatgtgcaggatcgacacaacaagaactactcctcctcttcctactcctatggcatgaagaactttctggaatatttcgagtgctcttggttgtctgaagacgagtttgtcctggacccaacccgcattaccttgtttaccggttattccggcatcgatggcgacacctttaaggtgaaatggttgatggaccgttacggtattcagatcaacaagacctctatcaactctgttttgttccaaaccaacatcggcaccaccggctcctcctgcttgtttcttcgatcctgcctttccctgatctctcaggaacttgaccagaagaaatccctgtttaacgagcgtgacctgaaccagttcaacgactctgtctacaacctggtgtctaactacatcgacctttctgagttctccgagtttcaccctctgttcaaaaagcgttactctgatccccgtgtgttcaaccgtgaaggcgatttgcgtatggcgttctatctggcctacgaggaagattacgtggaatacatcctgatggccgatctgaaggaacgtattcgacagaacgagttgattgtgtccgcttcttttattattccgtacccgcccggcttccctgttctggttcccggtcaactggtgtctcaggagatcgttgagtacctgtccggcctgtctgtgaaggaaatccacggctacgacgaatctattggtttccgttgcttttacaactttgtgctggactacttctataaccttgtcacctccgacccgtacggctactatcacaagattgacaagggtacgtatgaccgattgaaatattccaacttgtccaaacgccgctccatcgattcctcttatcacttgtacatctgcgacaacgagaccaaccgcatgaagaagacccacgtgtgtaacggctccttttccattgacaaccacaccgcaatttccgatacctatgaagatgtcgtgcaagtcaacaacctgcgttctgatcacggccgcggtaaccaccacccggtgggtccgtacgacgacggtaacaacggctctgtgccaaccattccaaccttgccccaagttgcgaaaggcgtgggtgaagtgaacaacgagcaggcgatgctttctgcatccgtcggctctatgtctaagggtaacttcgccaaggcccgtggcaaagaaacctttatcgcgcgtgaacagacccgcgcggaccgccgacaaaccaacgtttactataaccactctaacgatgtggtgaaatattctcagtcttcttcccacgtttctaagattaaggagaacgtgttgatcgtgcaaggcggtaaagcatacgcatcctgcgatgctggtcgttcctccgctaactatcgttaccgagacgacccttccacctctgttcccaaacaccgaaaaggcaagaaatgcaagggctgtaaatcttgtggtggcggtaaaggctctcaagcagagctggccaaacgccgtggtcgcgcggaatgtaccccgcacgaacgagaggataccgacgattttgcatctgaaggttctaaagaagatgacgttcacgcaggcggtcgccacctgtccggccgcgcgtctaacggtcgtgtcaccaagaaaggccgcaagaagaacgcagcaaagcgtgcatccgcccgcgacatcgcagcggaggcctccgagccaaaggatgctgatgaaaaagcggaggagaaactggacgagaaagaaggcgataacaccaactccgacgacgataccaccgttccagatgaagacggtgagtccacctccccagcgaaggagcgtcgccgcggcggcaaggcgcaccacgtggaaggcaccgattctggctcttacattacccgcgagaagggttcccgtggcgcaaaaggtcgcaagcaacgaggttttcgtaaccgtaaccgaaaccgttcccgatcttctaccgtccaatctgatgcgaccggcaacaccccatctcaggcaaacccaatgaccgaagttcaccccgtgcgcaaggccaccaagaacgatcgacgtgaagaggaccgttatggcgacgagctgggtggtggccccaccccgaagatgcgtcaatctaaccgtgttatgtgcaaccaagcaggcaagatcggtctgtctatgcagcgcaaatctgccgcgggctcctctaagcgtgaagacaacgtgggcggcgcatccggccgcgcgggcggttctgcttcccgttcctccggtcaaggctctggcatgaccctgtccgagaactaccagtcttccgaatctctgaacaaacgtggcgcacactcccacctgtcccgtaaatcttcctctggcctttctgcgtctgaaaaagcgaaccactctgccaccctgtgcggtggcaaaaacgctaagaaaaacgatcaagagggccacaaagttaaggagatgaactccccaaacggttccgaacgtaaggattccaaccacgaggcgcttctgaaacgtgaaatttttatcgatgaggaagaccctgataaagtcatcgcggatcacaccggttccgataactgctccaaaaaccgtgcaaccccagaagtgcacttgccccgatcctctggttctatctccggtggcgacgacgttaacggctctgcgcgccgagcgggctcccgcgtgggtctgccacttcacgcgaacggcaacgatgctaacaacggcacccccaacacccaaggtaaatccgaagttgccttctgcggtaacgactttcactacgatgaagaggacctgaagatcaactctgcggcacgtgagaactccgaactggaaaagtcttgtgtgcgtaagctgaactctcttaacaacaactcctatattaacaacttgatcacccacgtggacgacgacacctttattcacaaagaaggtaacttctttctggaatgcgcgttgaccaactctgagattaacggctcctcctttgagatggaaatgtcccttaacaacgtgtactctaacggcggcgagggcggtcgtcacccaggttcctatgatggcggcaagaagtctgattttgaa

SEQ ID NO: 367 - DNA, 2256 bp, Taylorella equigenitalis
atgaaatttcgtttcccgattgtgattatcgatgaagactttagatcagatagcgcatctggcttcggcattagagcactggcagacgcgatcgaagaagaaggctgggaagtactccctgcgaccagctatggcgatctgacatcatttgttcaacagcaaagccgggcttctgcctttattttaagcatcgatgacgaggaatttgaatccgattcaccgcaagacgtcgcagaggcgatccgtaatctgagatcttttattaacgaattgcgctttagaaacgaggatattcctatctatcttcatggcgaaacaagaacgagcgagcacatcccaaacgatattctcaaggaactgcatggctttattcacatgttcgaagacacaccggaatttgtggcaagacatattatccacgaagcgaaaagctatctggatacactggcaccgccgtttttcagagaattggtctcttatgcgcatgatggctcatactcatggcattgtccgggccacagcggcggagtagcatttctgaaatcaccggttggccagatgtttcatcaatttttcggagaaaacatgttgcgcgcagatgtgtgtaatgcggtcgaagaactgggtcaactgcttgaccatacaggcccggtggctaaatctgaaattaacgcagcgcgtatctttcatgccgatcactgctatttcgtcacaaacggcacatcaacatctaacaaaattgtatggcatggaaacgttgccgaagatgacatcgttgtggtcgatagaaattgtcataaaagcattctgcacgctatcacaatgacgggcgccattccggtttttctgcgacctacaaggaatcatctgggcattatcggaccgatcccgcttagcgaatttgaaccggagaacattaaaaagaaaattgaagataacccgtttatttcagacgaactgaaaaagaaacctcgcatcctgacccttactcagggcacgtatgatggaattttatacaacgtggaaatgatcaaggagaaactgggagatacaatggaaaatctgcattttgacgaagcatggttgccacatgctgcctttcacgaattttatacgaacatgcatgctattggcgccaatagacctagatccaaagaagctattatctacgccacacatagtacgcacaagatgttagctggaatttcccaagcatcacaaattatcgtccaggattccgaatcaagaaaattggaccgcaacatctttaacgaatcatttctgatgcatacatcaacatcaccgcaatatgcaattatcgcgtcttgcgatgttgcagcggctatgatggaaccgccgggcggcacagctctggtcgaggaaagcattcgtgaatctatggattttagacgcgcaatgcggaaagttgcgtcagaatttggtaaagatgactggtggttcaaagtgtggggaccgccgagacttgtccaggaagatattggttggcaaggcgattggctgctggaacctgatgcagactggcatggctttgcgaacattacagaaggctttacaatgcttgatcctattaaaacaacgatcgtaacaccgggcctggaaattgatggaacgtttgaggaaagcggcatcccggcatcactggtttcaaaatatctgaccgaacatggtattgtagttgagaaaacagggctgtactcatttttcatcatgtttaccattggtatcactaaagggcgttggaacaccctcctgacatcactgcagcagtttaaagatgactatgataagaatcagccactgtggcgatcgatgccggacttcatcaagcaatacccgatgtacgaatcatttggccttcgggatctgtgtcagaaactgcatgaagcatatcatcaccgtgacttagcccggattaccactgaagtgtacgtctccgaaatcgagagtgctatgcggccgaaagatgcctataacaaaatgacacgtcggcaaattgaacgagttgatattaatgaactggaaggaagggtaacagcggttcttttaacgccttatccgcctggcattcctttgctcattccgggcgaaaaattcaacaaaacaattgtccagtacctgaaatttgtgtgcgagtttaatgtcgaatttccgggcttcgaaacgatggtacatggtctgggcacagaaactcttcctaatggagagattcactattacgttgattgtctgatcgac

SEQ ID NO: 368 - DNA, 1137 bp, Gluconobacter oxydans
atgaccccgaagattactcgtttcctggccgagcagcaaccggctaccccatgcctggtggtcgatcttgacgttgtgggcgcccactaccgtgcattgcacgatgcgttgcctgaagcaaagatctactatgcaattaaagccaacccggcacccgccatcttggatcgtctggttgcacttggctcctctttcgacgtggcttccccggcggagattcgtatgtgcttggatgctggagcgaccccagaccgaatctcctacggcaacactctgaagaaagccgagtggattcgtgaagctcacgatctgggcatttcccttttcgtgtttgactctatcgaagaattggaaaagttggcaaaacatgcaccaggcgcacgtgtgttctgccgtttggcggtcgaaaacgagggtgcagattggcctttgtcccgtaagtttggcaccactttgtcaaatgcacgtgcattgatgctccgtgcacgtgatttgggcttgaaaccatacggcttgtccttccacgtgggctcccagcaaaccggcgtggcagcctacgatcacgctatcgcgaaggctgcgggcttgtatcatgatttgcgtgcacagggcgtggatttgcagatgcttaacttgggcggcggcttcccaacccactaccgtgagaatgttccttctgtgcaggatttcgcggacaccattcacgcatccttgcgtactcattttccagatggtgcccctgagatcttgctggaaccgggccgatatatggtcggtcaatccggcgtggtgtcctccgaagtgatcttggtttctcgtcgaggcggtgctgttaccgatccccgttgggtgtacctggacattggtcgattcggcggcttggctgaaaccgagggagaagctatccgatatacctttcgtaccagccgcgattccgatgaagctacccgttccccatgcgtggtggcaggcccctcatgtgatggtgtggacatcatgtacgaaaagaaccgcattccactgcctgattcccttgagtgtggcgatcgtgttgaaattcttgcgaccggcgcatacgtgtccacctacgcatccgtgggcttcaacggttttccacctttgaccgaatactatatc

SEQ ID NO: 369 - DNA, 1821 bp, Unknown
  Description of Unknown: Candidate division TA06 bacterium 34_109 sequence
atgaatctcattaactatgatctgatcgttgtgacagatgacaagaaaaagaaagcaaagtacaattttctgaacggcgaagaagttctgtttaatcatacccgtttcagaattagactgatcaacaagttcatctacagcgaaacaggtcttgatcggttaatgtacgacggggtcatcgtagatgttaagcaattcgaagatgacattatcaacacgctgctgttttataacaaccagtcagaaatcttcatcttcgactacaagttcaagccgaacatcgctaacagaaacaccaagtacttctacgaattgagccatctcaaggatctgatcatccaatttttctatgaaagacgctacaatacaccgtttttcaacgctcttaaaagattagccagaagcaaaaaacagagatggcatacacctggccacgtaggcggagaagcctttgagaaatatacgtctgttcgcgatttcaagcgtttctacaagaacaacatttttctgaccgacacatcagtttcagatccgtcatttggctcactgttgagtcataattcggtcttcaaagaagcagagaaactgctgagcacagcctatggcacgctttactctttcatcaacgttcatggcacatcaacatcaaacaagatcatcttcatgacacttttagataagggcgacaaagtgattgtcgatcgtaatatccataaatctacgattcactccattatcgtcagtggtgcattgcctatttttctgaaggcgaacttcaaccgggaatttgggattatcttaccaacacggaaagaagaagttttgcgatgcatcgaagagaataaggacgctaaattgctcgcccttacagttccgacgtatgatggtctgaggtacaaccttccggaaatcatctcattagcacatagatacaagattaaggtattggttgatgaagcatggggcgcacacatgcactttcatcacgattattacccggacgcattacaatccggcgcggattacgtcgtacaatcaacacataaggttatgggagcattttcacaagcgagcgtaattcacgttaacgataaggacttcaaggagaaaaaatatgaatttttcgagaactacatgtttttctcatcaacatcacctttctacccaattgtggcatcgatcgatgtctcacgcaaactgctttcatgtgaaggaaagatgattctggaaaaggttaaaaaatattacgaacaactggtcagcgagatcgatgcgcttaatgacttcaaggtgcttaagcggtcttacctcaaggattactaccaggacaagaacgaaatcttattggattacacaagaattttagtcaacttttcgaaagcaggtatcggcaaaaaacaaatctacagttatctgctgaagaataagatcgttgtggaaaagatcaactacaactctttcacacttttattgggcgttggaacaacgcagaacatggtaaagcgcctcatcaaggttttgaaggacttcaagtacgaaaaacgtgatttagaagaaaaatcaatccaatttatctggaatgatttggaagctacaatcccgcctttcgaagcatatcagtctaagggtgaatggattgaactgaagaatgcgaaagggcgtatctcttccaacatgctggtgccgtatccgccgggcattccgcttattatccctggacagatcttcaccgaagacctcatcaacaatctgctggaaatcacatcatttgatgaaatcgagattcatggcctgattaaagggaaggtgaaagtccttaaa

SEQ ID NO: 370 - DNA, 2268 bp, Sinorhizobium medicae
atggagttctacaaggcatttccaatcgccgtgattgatgaagactatgagggtaaaaacgcagctggacgtggtatgcgttccttggcagaagccatcgaaaaggaaggctaccgtgtggtcggcggtttgacctacgaagacgcacgtcgtttggttaacgtgttcaacaccgaatcatgctggttgatctccgtggatggtgctgagtcctctaccactcgttgggaaattctggcggagttgctggctgcgaagcgttcccgaaacaacttgttgcccatcttcctgtttggcgatgacaccactgcagaaatggttcccgccccagtgcttcgtcacgctaacgcgttcatgcgtttgttcgaagattctccggagttcatggcacgtgccatcgtgcgagcagcccagaattaccttgaacgtttgccaccaccaatgttcaaggctttgatggagtacactttgcacggcgcgtattcttggcacaccccaggccacggcggcggcgtggcattccgtaagtccccagtcggtcaactgttttacgccttctttggagaaaacacccttcgatccgacatctccgtgtccgtgggctccgttggttctttgctggatcacgtgggtccaatcggagaaggcgagcgcaacgctgcgagaattttcggcgcagatgaaaccttgttcgttgtgggcggcacctctaccgccaacaagatcgtttggcacggcatggtgacccgtaacgatcttgtgctctgcgaccgaaattgtcacaaatcgatcttgcattccctgattatgaccggtgcaaccccaatctaccttaccccatcccgtaacggcttgggaatcattggccctattgccaaggaacagttcaccccggaggctatcgcgcagaagatcgcagccagcccttttgctggagaaaccaacggcaaggtgcgtcttatggtcgttaccaactccacctacgatggcttgtgctataatgtggatggcatcaaggctgcgttgggcgatgcagtggaagtcctgcacttcgacgaggcctggtttgcatacgccaacttccacgaattttacgacggctaccacgcaatctcctccaccaagccagcgcgttcccaggaagcaattaccttcgcgactcagtccacccacaaacttctcgcagcattctcccaggcatccatgttgcacgtgcagcatgctgaagcgaagcaactggacatcacccgtttcaacgaggcttttatgatgcatacctctacctctccacagtacggtatcattgcgtcctgtgacgtcgctgcggcaatgatggaacagccagcaggccgtgccttggttcaagaaaccatcgatgaggcaatgtccttccgtcgtgcagtcaacgcggttcgcacccagatgcaagactcctggtggttcgaagtttgggagcccccaattgcagatcgtgccccttctgatgcaaagtccgactgggtgctgaaaccgggcgatgcatggcacggtttcgaagaccttgccgagaaccatgttatggtggacccaatcaaggttactattctttccccaggcttgaatgcaggcggcaccatgttggaacacggtatcccagccgctgtggtcaccaagttcttgtcctcccgtcgtatcgaaattgagaaaaccggcctgtactccttcttggtcctgttttctatgggtatcacccgtggcaagtggtccaccctgattaccgaattgctgaacttcaaagatctttacgacgcaaatgcaccattgtcccgtgcattgccagctttggcggcagcccaccctgacgtgtatcgtactatgggcttgcgagatctgtgcgagaagatccatgacgtctaccgctccgatgacgttccgaacgctcagagagaaatgtataccgtccttcccgagatggcattgcgtccagctgatgcgtacaatagactggtcaaaggatgtgttgaatctatcgatattgacgagttgatcggccgtaccctggcagtgatgattgtcccatatcctccgggtatccctttgattatgccaggcgaacgcatcactgctgcgaccagatcgattcaggattacctggtctatgcgcgatccttcgacaagaaattccctggctttgaaaccgacatccacggcttgcgctttgttgccaacccgtccggccgtcgttacttggtggattgcattgtcgaagagggccaggatgacaccgct

SEQ ID NO: 371 - DNA, 2139 bp, Escherichia coli
atgaacatcattgccattatgggtccacacggcgttttctacaaggacgaacccatcaaagaacttgagtccgcattggtggcacagggttttcaaatcatttggccgcagaactctgtcgatttgctgaagttcatcgaacacaacccacgtatctgcggcgtcatttttgattgggacgagtactccttggatttgtgttcagatattaaccagttgaacgaatacttgccactgtatgcgttcatcaatactcactcgactatggatgtctccgttcaagatatgcgtatggcactttggttctttgaatacgcgctcggccaggcagaggacatcgccattcgcatgagacaatacaccgacgagtatttggataacatcaccccaccattcaccaaggcactgtttacctacgttaaggaacgtaaatatactttctgcaccccaggtcacatgggcggcaccgcataccagaagtcccctgtgggctgtttgttttatgacttctttggtggcaacaccctgaaagctgatgtctccatctctgttaccgaattgggctccttgttggatcacaccggtccacacttggaagcagaagagtacatcgcccgtaccttcggtgctgagcagtcctatattgtcaccaacggcacctctacctctaacaagatcgttggaatgtacgcagccccttcgggctccaccttgctgatcgaccgaaactgccacaagtccttggcccacttgttgatgatgaatgatgtggtcccagtgtggctgaaacctacccgcaacgctcttggcatcttgggcggcatcccacgtcgagagttcacccgtgatagcattgaagagaaggtcgctgcgaccactcaggcgcaatggcccgtccacgcagttatcaccaactccacctacgacggcttgctgtataatactgattggatcaagcagaccttggacgtcccatctattcatttcgatagcgcatgggttccgtacacccactttcatcccatctaccagggcaagtccggcatgtcgggtgaacgtgtggcgggcaaggtcatcttcgaaacccagtccacccacaaaatgttggcagccctgtcccaagcatctctgatccatattaagggcgaatacgacgaagaggctttcaacgaggcgtttatgatgcacaccactacctctccgagctatcccattgtggcgtccgtcgaaaccgctgcggcaatgcttcgaggaaacccaggcaagcgcttgatcaaccgttccgtggaacgtgctttgcacttccgcaaagaggtccagcgtctgcgagaagagtcagacggctggttctttgacatctggcagccgccccaagttgatgaagctgagtgctggccagtggctcctggcgagcagtggcacggcttcaacgatgcggacgcagatcacatgtttctggacccagtgaaggtcactatccttaccccaggcatggatgaacagggcaacatgtccgaagagggtattccagccgctttggtggccaagttcctggacgaacgtggtatcgttgtggaaaagaccggcccatacaacttgttgttcttgttctccatcggcattgataagaccaaagcaatgggtttgctgcgtggcttgaccgagttcaagcgctcttacgaccttaacttgcgtatcaagaacatgcttccggatttgtacgcggaagaccccgatttttatcgtaacatgcgaatccaggatttggcacaaggtatccacaagttgattcgtaaacatgatttgccaggcttgatgctgcgagccttcgatactctgccagagatgattatgacccctcaccaggcttggcagcgccaaatcaagggtgaagtcgaaaccattgcgttggaacaactggttggccgtgtgtccgcaaacatgatcttgccgtacccacctggcgttccgcttctcatgcccggtgaaatgctgactaaagagtcccgtaccgttttggacttcttgctgatgctgtgttcggtgggtcagcactacccaggctttgaaaccgacatccacggcgccaagcaagacgaggatggcgtgtatcgtgtgcgtgtgctgaaaatggctggc

SEQ ID NO: 372 - DNA, 1335 bp, Staphylococcus aureus
atgaaacaacctatcctgaacaaacttgaatcattaaaccaagaagaagcaatttcactgcatgttccgggccacaaaaacatgacaatcggacatttgtcacaactcagcatgacaatggataaaactgaaattcctggcctggatgaccttcatcacccagaagaagttattctggaatctatgaaacaggtagaaaagcattccgattatgacgcgtactttttggttaacggcacaacatcaggcattctgtcagttatccaatcattttcccaaaagaaaggcgatattcttatggcgcgtaatgtccataaatcagttttacacgctttggacatttcgcaacaagaaggccattttatcgaaacacaccaatcaccgttaacgaaccattacaacaaggtgaacctgtcaagactgaataacgatggccacaaacttgcagtcttaacctaccctaactattacggagaaacattcaacgtcgaagaagttatcaaatcactgcatcaactcaacattccagtgctgatcgatgaagcacatggcgcacattttggcttgcagggattcccggattctacactgaattatcaagccgactacgttgtgcagagctttcataaaaccctgccggcacttacaatgggctcagttctctacatccataagaacgcgccttaccgagaaacgattatcgagtatctgtcctactttcaaacatcatcaccgagctatctcatcatggcttctttagaatccgcagcgcagttctataaaacatacgatagcacggttttctttgacaatagagcccaattaattgaatgcctggaaaagaaaggctttgaaatgcttcaggttgatgacccgttaaaactgcttatcaagtacgaaggtttcacagggcatgatattcaaaactggttcatgaatgctcacatctatcttgaattagccgatgactaccaggtattagcaattttgccgctctggcatcacgatgacacgtatctttttgattctctcttgcgtaagatcgaagacatgatccttccgaaaaaatcagtttcaaaggtgaagcaaacacagctcctgaccactgagggtaactacaagcctaagagattcgaatacgttacgtggtgtgatctgaagaaagcaaaagggaaggttttagcgcgccatattgtgccatatccgcctggtatcccgattatcttcaaaggggaaacaattacggagaacatgatcgaattggtcaatgaatatctggaaacaggaatgatcgtagaagggatcaagaacaacaagatccttgttgaagatgag

SEQ ID NO: 373 - DNA, 1539 bp, Brevibacterium linens
atgcatcaagattcaccgatgacgagcgcctccgaccattcagcctttcctggcacagcaaaaacatacgccccttacgcagacgcactgcaggccgcggcaaaacgggacagcctgtttttgtccacaccgggtcatggaggtacaacgacaggtattagcgcgggtcaagcagaatttttcggcgaacatacacttagcttagacattcctccgctttttgatggaattgatttaggcgttgacacgccgaaagacgaagccctgcaattagcggcagaagcgtggggtgcacggcgtacatggtttctgacaaatggctccagccaaggaaacagaatggcagccttagcgattggtacactgggcacgggtgttgtgacgcagagatcagctcattcttcctttatcgacggtattgttttagcgggcttgaaccctggttttgtttctcctaacgtggatgaagttaatggtatcgcgcatggagtcacgccggatagcctgcggcatgctatcgcggcacatccggaaaaagtttcagcggtctacttagttacaccgtcctattttggtgcagtagcggatgtttctgctttggcagaagtggcgcatgaagcaggtgcagcgttgatcattgatgccgcatggggtgcgcattttggctttcatccggatttaccggaatctcctgtcacacttggagcagatattgttatcatgagcacacataaattggcgggtagctttacacaatcagcccttctgcatttgggcgatacagaatttgctaatagactggaaccggctcttgcgagagcatttatgatgacagcctccacgagcgaaaacgctcatctgatggcgtcaatcgacattgcgagacgggacttggtaaatagccaggatgcgattgcagactcactggataatatcagacagatccgtgcaagaatcgaaggtagcgaacattatcatcttttaagcggagattttatgaatcatgcggacgtcgtggatattgatccgtttcgcctgccgattgacattacatccacaggattagatggccatgcagttcgcaaaagactgacggaagaatttgacatctttgctgaaatggcaacagcgacgacaattgttgcactgattggcatcggtaaatcacctgatttaggccggctgtttgatgcgcttgaccaaatccgtgcggaaaactcaggcacaccgggtgcaggcacagcggaatcagcaacgcgggcaagcggtattcctgccttgcctaatgcgggtgaattggtggcgttaccgagagacgcatattttgcggaaagcgaactggttccggcggcagaagcgatcggccgtacatcagtcagctcattggccgcgtacccgccgggaatcccgaacgttcttcctggagaaagaatcacggcagaaacggtggaatttttacaagcggttgctgcttcaccttcaggtcatgttcggggtggtgtggacgcaacgctgtctatgtttcgtgtgttaaaagat

SEQ ID NO: 374 - DNA, 2262 bp, Castellaniella defragrans
atgaagttccgttttccaatcgtgatcattgatgaagactacagaagcgagaacgcctcaggtttcggcatccgtgcattggcagccgctattgaagcggagggcgttgaagtgctgggtgtcacctcttacggcgatttgtcttccttcgctcagcaacagtcccgtgcatcggccttcatcttgtcaattgatgacgaagagtttgatgaagactcgcccgaggacgtcgctaacgcaatcaagaacttgcgtgcgttcattggtgaactgcgtttccgtaacgaggacatccccatctacttgtatggcgagacccgtacctctcaacacatcccaaacgacattcttcgagaattgcacggcttcatccacatgtttgaagataccccggagttcgtggcacgccacatcattcgtgaagcacgagcctacttggacagcttgccaccaccattcttccgtgaattgctggagtacgcttcagatggctcctattcatggcactgcccaggccattctggcggtgtggcattcttgaagtccccggtcggtcaaatgtttcaccagttctttggcgagaacatgctgcgtgccgatgtttgtaatgctgtggacgaacttggacagttgttggatcacaccggcccagttgctgaatccgagcgcaacgcggcaagaatcttccacgcggatcattgcttctttgtgaccaacggcacctctacctctaacaagattgtgtggcacgcaaacgtcgccgctggcgatgtggtcgttgtggaccgtaattgtcacaaatccatcctgcatgccattaccatgactggcgctatccccgtgttccttcgcccaaccagaaaccacttgggcatcattggtcccattccattggaagagttcgaccctgaatccatccgtcgaaagattgaggcgaacccctttgcacgtgaagcggcaaacaagcgtccacgtatcttgaccctgactcagtccacctacgatggtgtcatctataacgttgaaatgatcaaggagaaattgggctctgagattgataccctgcacttcgacgaagcctggcttccacacgccgctttccatgaattttacgaggacatgcatgcaatcggccctaaccgcccgagatccaaggataccatgatctacgccacccactctactcataaattgctggcgggcctgtcccaagcatctcagatcgtcgttcaagattgcgagtcccgtcagcttgaccgaaacatcttcaacgaagcatttttgatgcacacctctacctctccacagtacgccatcattgcttcttgtgatgtcgcggcagccatgatggaaccaccaggcggcaccgcattggtggaagagtcgatccgagaagcgctggacttccgtcgtgcaatgcgcaaggtcgaatccgagttcggcaagaacgattggtggtttaaagtttggggtccaaaccgactggtgccggaaggcatcggtaatcgcgaggattgggttctgggctccggcgacgagtggcacggtttcggcgatttggctgaaggctttaacatgttggacccaatcaaggcgaccgtggtcaccccaggcttggacatctcgggcaccttcgcagattccggcattccagctgcgttggtgtcccgttacttggtggaacacggtgttgtggtcgagaaaaccggattgtattccttcttcatcctgttcaccatcggaattactaagggccgttggaacacccttctcactgctttgcaacagttcaaagatgactacgatagaaatcaacccttgtggcgtgtgctgccagagttttcccgtgcgcacaagcattatgaacgcatgggccttagagatttgtgccagaaaatccacgaagcataccgacattatgatttcgcccgtcttaccacccgtgtgtacttgtccgacatggttcccgcaatgcgtccagctgatgcgtatgcacgcatggcccaccgtgaagtggagcgtgtccctgttgaccgattggaaggtcgtgtgaccggcgtgttgctgaccccgtaccctccgggcatccctcttctcattccgggtgaacgtttcaaccgagacatcgtggactacctgaagttcacccaagagttcaaccaacagttcccaggctttgaaaccgacgtgcacggcttggcatacgaaaccgatgagcagggccgtcgtcactactatgtcgattgcatccgtgaaggcgcc

SEQ ID NO: 375 - DNA, 2145 bp, Escherichia coli
atgaacgtcatcgctattcttaatcacatgggcgtttacttcaaggaagaaccaattcgtgagttgcatcgagcgcttgaacgcctcaactttcagatcgtctaccctaatgatcgcgatgacttgctgaagttgattgaaaacaatgctagattgtgcggtgttatcttcgattgggacaaatacaacttggaattgtgtgaagagatctccaagatgaacgaaaacttgccactgtacgccttcgctaatacttattcgaccttggatgtgtccttgaacgaccttcgactccagatctccttctttgagtacgctctgggcgcagccgaagacatcgcgaacaagattaaacaaaccactgacgagtacatcaacactattttgccacctctgaccaaagcattgttcaagtacgtgcgcgaaggcaaatatactttttgcaccccaggtcacatgggcggcaccgcattccagaagtccccagtgggctccttgttctacgatttctttggccctaacaccatgaaatccgacatctccatctccgtgtccgaattgggctccttgttggatcactccggcccacataaggaagcggagcaatacattgcacgtgtgttcaacgccgaccgttcgtatatggtcaccaacggcacctctaccgctaacaagatcgtcggcatgtactcagcgcctgcaggctccaccatcctgattgatcgtaactgtcacaagtctcttacccacttgatgatgatgagcgacgttaccccgatctacttccgccccaccagaaacgcatacggcatcttgggcggcatcccacagtctgagtttcaacacgccaccattgctaagcgtgtgaaagaaaccccaaacgctacctggcctgtccacgcggttatcaccaactccacctacgatggtttgctgtacaacactgacttcattaagaaaaccctggatgttaaatccatccacttcgactctgcatgggtgccgtacaccaacttttcccccatctacgagggcaagtgcggcatgtccggcggccgtgttgagggcaaagtgatctacgaaactcagtccacccacaagttgctcgctgcgttctcccaagcctctatgatccatgtcaagggcgatgttaacgaagagaccttcaacgaggcttacatgatgcacaccactacctctccacactatggtatcgttgcatccaccgaaaccgcagccgctatgatgaaaggaaacgcaggcaagcgtttgatcaacggctctattgaaagagccatcaagttccgtaaagagattaagcgtttgcgaaccgaaagcgatggttggttctttgacgtctggcagccggatcacatcgacactaccgaatgttggcccctgcgatcagattcgacctggcacggcttcaagaacattgataatgagcacatgtacttggacccaatcaaagttactttgctgacccctggtatggaaaaggatggcaccatgagcgacttcggcattccggcgtcaatcgtggcaaaatacctggatgagcacggcatcgtggtcgaaaagaccggtccctataacttgttgttcttgttctccatcggtattgacaagaccaaggcattgtccttgctgcgagcccttaccgatttcaaacgcgcctttgacttgaacttgcgtgtgaagaacatgttgccgtccctgtaccgtgaagatcccgagttctatgaaaacatgcgaatccaggagctggcacaaaatattcacaagttgatcgtccaccataaccttccggatttgatgtaccgtgccttcgaagtgctgccaactatggtcatgaccccttatgcggcatttcagaaggagttgcacggtatgaccgaagaggtttacctggatgaaatggtgggacgcattaacgctaatatgatcctcccttacccaccaggcgtgccacttgtcatgcctggcgagatgatcaccgaagagtcccgtccggtgttggagttcctgcagatgctttgcgaaattggcgcgcactaccccggttttgaaaccgacatccacggcgcataccgacaagctgatggccgttacaccgttaaagtgttgaaggaagagtccaagaaa

SEQ ID NO: 376 - DNA, 1431 bp, Pontibacillus halophilus
atgattgagcatcaaagaacaccgctgtatgaaacactcgtcaaacatcgctggaagggcgctacatcttaccatgttccgggccacaaaaatggaaacgtattttatgaacggggaaagacactgtttcaggatattctgtcgatcgaccttactgaaatttcaggcctggatgacttgcatgaaccgggcggagttatccaagaagctcaggaactggcatcaacacattttggctcaagagcaagttattttctggttggcggctcaacagctggtaacttagcgtccgtattggcagcgagtgaacgagaaggcccgatcctcatccaaagaaattcacataagtcaatctataacggcctggaactgagcggggcatctacagttctgattgcaccgagatattcagtgaggacgggcctgtaccatgatctgcatgttgaagacgtgattgaagctgttgagcaatttcaggatgctagcgccatcgtgctgacatatcctgactattacggaaacacgtacgatcttaaatctatcatcgactacgctcatcaattcgatattccggtcatcgtagacgaagcacatggcgttcatctgcatcttgatccgagattaccgtcatcagctattgaattgggagccgatattgttgtgcattcagctcacaaaatggcaccggcgatgacaatgggcgcctttcttcatcactgctcatcaagagttgatattaaccgcattcaacattacttgcaactcattcaatcatcatcaccgtcttatcctatcatggcgagcctggatctttctcgtgcttatctcgcctcactggacgaaaaagagattggaagaatcctggaacgcatcgaaacggagcggaaactgatggcaagccctcatcactacgaagttattccacatcacgcgacagatgacccgtttaaaacaacgctgcgcgtgcaagaaggttataatgggcaggagattgcaagacgccttgaaggcgttggcctgtttcctgaattagtgcaagatagccatatcctgcttgttcatggcctggattactctgaactgaacacaattgaaaaacgctgggagaaggcgcataattccctgaaatcaatgcagggaaaccacgcaaccattgaaacagaagttatgaattatccggcgatcacgcgtatgccatatccgtaccaacagttaaaacattgggtcacaaaagaagttacggcagaagaagcagtcggccaactttcggcttgctcagtaattccatatccgccgggcattccgttaatcgccaaaggcgaaattatcacggagggacagattaatgaacttcgtcggttacaacagagcaacttacatatccaaagctctgagtgtaatttgcagaagggcttattgatttatgaacgt

SEQ ID NO: 377 - DNA, 1461 bp, Eubacterium sp.
atgaagaaagatctgcttgaaagattagaagagtattgcggtgctgactacgtccctttgcacatgccgggagccaaacgcaatacccaagaatttgtaatgccaaacccgtatgcaattgatattacggaaattgatggcttcgacaatatgcatcacgcggaagacatcttgaaagaagcatttgagagaacagcgaaactgtttggtgctgaagaatcactgtggttgattaatggctcaagcgccggattattggcagcgatctgcggggcaacaaagaaaaatgatacggttttagtggctcgaaattgtcatagggctgtgtataacgccatctatctgaatgaattaaacccggtttatctgtaccctaaagaagttacgtccggtatctatggggcggtttctccgtcccaagtggaacaggcttttaaacagcatgagaatattcgagccgtcattatcacaagtcctacgtatgaaggaatcgtttcggatgttaagaaaattgcagaaatcgttcatcgttacggcaaaattctgatcgtggatgaagcacatggcgcacattttgcgttccacgaagcctttcctgagagcgcagtgttttgcggtgcggatgctgtaattcaatctatccataaaacgttgccgtcactgacccaaactgcactgctgcatctgcagggaaacattgataaagaacgtgtcagacgctattgggacatgtaccagacaacgagtccaagctatgttttaatgggcggaattgatcggtgtatgaccgtacttgaaactaaaggcaaaccgctgtttaatgcctatgtaacaagacttttagcactgagaaagaaactggaaattcttacaaacatcagactgtttccgacggatgacattagcaaaatcgtcttgctggttagagatggcaagaaactgtaccaagaactgcttaacaaataccatatccaactggaaatggcgtcactgcagtatgttattgctatgaccagcatcggcgatactgacgaatattacgagagatttttcgaagctctgcggcaaattgatgacgagatgcagacaaaaatccgtcggggacaaaaatcacaacttcagacggaacaaaatattaaacagagaaacgaactgccgaccgaactggaaaacgttgagaaaattactgcctttatggaatgcttcccagaggtgaagtgtaatccgtatgatgcgcagaacggcgacgctgaaccggtcgaactgggtctgtgcgtagggagaacagctgccgcaggtgtttgtttttatccgccgggcattccgcttatccaagcaggcgaagtgtacacaggagaaattgcggagattatccgggaaggcattcagaaaaatctggaagttattggcatcgaaaaatcagagaagggagtctatgtatcatgtttgaaaagctacttt

SEQ ID NO: 378 - DNA, 1413 bp, Clostridium sp.
atgtctaacaaaacaccgctgcttgatgaagtgcttaagtacaagaaagaagaaaatctgatttttagcatgcctggtaacaaatgtggcaaagtttttctgaaggataacatcggtaaagaatttgtggacacaatgggctatctggatattacggaagttgatccgctggataacttacatgctccggaaggcattattctggaagctcaacagttattggccaaaacgtatggcgttaagaaagcatatttcatggtaaacggctcaacaggcggcaacctttgttcgatttttgcagcgtttaatgaaggcgatgaggttttagtggaacgaaattgccacaaaagcatctataacgggttaatcttgaggaaattgaaggtgaaatacattgaaccgctgatcgatgagaaactgggaatttttcttccgcctgacaagaaaaatatctatgatgctatcgaacaatgcgagaacttaaaaggtattatcttgacctatccttcatacttcgggattacgtatgatattgaagaagttctgctggatctgaagaaaagaggcttaaaaattgttgtggacagcgcacatggcgcacattttatcgctaataacaaactgcctaaagccatctatggcattccggattacgtcgtactgtctgcacataaaaccttgccagcgctcactcagggttcatatcttctcagcaacacagatgacaacgcggtagaattttatctgaacacgtttatgacaacgtctccttcctatttgattatgtcaagcctggattacgcaagatattaccttgacgaatatggctacgatgaatatgagcgtctgattaacaaagcggaaaaataccggtctattatcaattccttgaacaaagttcatatcatctccaaagaagatcttgctgaggattatgacattgataaaagccgctacatcgtcacagtttcaaaagaatattcgggccacaaactgctggaatacttaagagagcaacgcattcagtgtgaaatgagttttgcctcgggagttgtgctgcttttatcaccgatcaatgatgacgatgacttcaagaaactgctgaaatcatttgaaaatctgcaactgaaagacattcgtcaggataactactcaaagtactacagctttatcccgaagaaagttctggaaccgtatgaagtttttaagaaagaatgcaagtacatcaaaatcaatgaagcagataagaacatcgcatgtgaagcgattatcccgtatccgccgggcattccgctgctttgtccgggcgaagtaattacgaaagaagcaatcgatattatcgatgactacatctctaataaccgatccgttattggcattaaaaacaaagaatatattaaagtcgtaatcgag

SEQ ID NO: 379 - DNA, 1401 bp, Gloeobacter violaceus
atggaaaccaccccattgtgggatgcacttcgtgctgttgctttggcttccggcaccggattccacaccccaggccataacggcggtgccggattgccaccagctttgaagcactggccagattggggtcgtttggacctgaccgaacttgccggcttggataacttgcacgctcccaccggtgtgatcgcacatgcccagcgattggcagccgctgtttggggcgccgagagatcctggttcttggtgaacggagctaccgcgggcatccaggctatgttgctggcggcactgggccagggtcaaaaagtgttggtccctcgtaattgccaccaatcgattgtgcatgcccttgtcctctccggcgctgttcccgtgtttgtccagccagtctgggatcgtcgatggcaactggcgcacggccttaccgcaaccactgtcgaagccgctttggcggttcaccccgacattcgtgccgtggtcgctgtgcatccaacctacttcggtgctgtcggagagacccgtgcaatcgcccgagtcgctcacgcgaagggcattgcattgttggtggatgcggcacacggcgcacacttgcgttttcaccctgatcttccggaatgtgccttggccgctggcgctgacttggttgtgcactccgcgcataaaaccctgccagcacttactcaggcggcattgctgcaccagcaaggcaccctggttgatcctgcgcgtgtggagatggcattgaacttgttgcaaaccacctctccgtcttatttgctgatggcctctttggacctggcacgtgcacacatggtgcgtcacggccgagaacagctcggacacatcttggagatggcccaccgcctgagacataagttgccattcgctgtcttgggcggcgatggcaccccaggctttgacccaactcgtttggtcattgatgttggagaaaaaggctggagcggtcacgccgctgaaacctggctggagcagaacgcacaagttcgcgcggagatggcaacccacagacacttggtgttcatcttgaactccgcgcacaccgaatttgatggcgagcagctgcaggcatccttgctcgctctggctaccgcacagcctaccggtgcaaccccaccagatttgttgccaccaccattgcctgaattgcgctactccccacgtgaagcattcggccgttcccaccgttccgtgccattggcggcagccgctggtcttacctctgctgcagatgtttgcacttacccaccaggcgtgccagtgcttttgccaggcgaagtggttgccgctcaatccgtggagtatttgggcgcggcaatcgataccggcgcagaaactgtgggtattgacggacgtggccacatccgagtcaccattgac

SEQ ID NO: 380 - DNA, 1431 bp, Pontibacillus halophilus
atgatcgagcaccagcgtacccctctttacgaaactctcgtgaagcaccgatggaaaggcgctacctcttatcacgtgccaggccataagaacggcaatgttttctacgaacgtggcaaaaccttgtttcaggacatcttgtcaattgacctgactgaaatctccggtttggatgacctgcacgaacctggcggtgtgattcaggaagctcaagagttggcatccacccacttcggctcccgtgcatcctactttctggtgggcggctccaccgcaggaaaccttgcctctgtcctcgcagccagcgaacgcgaaggcccaatcttgattcagcgtaactcccacaagagcatctacaatggtttggagctgtcaggagcatccaccgtgctgatcgccccgcgttactccgtccgaactggcttgtatcacgatttgcacgtcgaagacgttatcgaagctgtcgagcagttccaagatgcttctgcgattgttttgacctaccccgactactatggtaacacctacgatttgaagtccatcattgactacgctcaccagtttgacatcccagttattgtggacgaggcacacggcgtgcacttgcacttggacccacgtcttccttcctctgctatcgaattgggtgcggacattgtggtccactccgctcataaaatggcaccagccatgactatgggcgcgttcctgcaccattgctcctcccgtgtggacatcaaccgtatccagcactatttgcagctgatccagtcctcctccccgagctaccccattatggcatccttggatttgtcccgtgcataccttgcatccttggatgaaaaggagatcggtcgcattcttgagagaatcgaaaccgagagaaaattgatggcatccccgcaccattatgaagttatcccccaccatgccaccgatgacccattcaagaccactttgcgtgtgcaggaaggctacaacggtcaagagatcgcacgtcgtttggaaggcgtgggcttgttccccgaattggtgcaggattctcacatcttgctggtgcacggcttggattatagcgaactgaataccatcgaaaagcgatgggagaaagcccacaactccttgaagtctatgcaaggtaatcatgcaaccatcgaaaccgaagtgatgaactacccggccattacccgtatgccgtacccctatcagcaactgaagcactgggtgaccaaagaagtcactgcagaagaggccgttggccagttgagcgcttgctccgtgatcccatacccaccaggcatcccactgattgcgaagggcgaaatcattaccgagggtcaaatcaacgaattgcgtcgtttgcagcaatccaacttgcacattcagtcctccgagtgtaaccttcaaaaaggccttctcatctacgaacgt

SEQ ID NO: 381 - DNA, 1422 bp, Sporosarcina ureae
atgaagtaccaggatcgtccgttggtccaggccctgcaaaacttccacgaccgatcgccagtgtcctttcacgtccctggccataaaggcggtgcgctttccgatttgccagttgcagtgcgtcaggcactggcctacgacttgaccgagctgactggtcttgatgatttgcacgaagcaaccggagccatcaaggaagctgaggataaattggcgtgcctgtacggctctgaacagtccttcttcttggtcaacggttctaccgttggaaacttggcaatgctctatgccaccgtgcagccaggtgacttggtcatggttcaacgtaacgcccacaagtccatcttcaacgcattggaattgaccggagctaacccggtctttttgtcacccgattgggacgaacagacccaaactgctggcaccgtgtccttgaagactgtcaaagaggctctggcgcagtacccagatgttaaagcagccgtgttcaccaccccaacctactatggcatcattaaccgtgacctgcgacagatcattgaggtctgtcatagctattcaatcccaattttggttgatgaagcacacggcgcacacttcattgtgcacgacgcatttcctaagtctgccttggaactgggtgctgatcttgtggtccagagcgcacacaaaaccctgcctgctatgactatggcatccttcttgcatatccgctctaagtttgtgaaagtcgagagagtggcgcactacttgcagatgctgcagtcctcctccccaagctatcttatgatggcatccttggatgacgcacgctactatgccgaaacctacgatgagaaggactatgaatccttccagatctacagaaacaacttgattcaaggcctctgcaacatcgcacgtgtggaagtggtgcgtaccgatgaccagctgaaattgctgattcgtgctgcgggacacaccggctacgttttgcaagaagcgctggagcagcaaggcatctacccggagcttgcagatttgtatcaggttcttctcgtgttgcccttgctgaaggctggtgacgaagagtcctgcgtcgatctggttgaccaattcaaggttgcgatggattgtttggcagaaaaagagaccacctctatgcgtttcaacaattttacctctaactcttccccatcctctgtcgtttacaccgccaatcagctgcatactatggacatcgaatgggtgtccatgcaatcggctatcggcaaggtggcagccgctgcgatcattccgtacccaccaggcatcccacttctctgcgcaggcgagcgaattaaccaggaacacatggtgcaaatctatgatttgctgatggccggctgtcgtttccagggtgcaatcaaccgagagaagaaacaaatcaaggtggtctttgaa

SEQ ID NO: 382 - DNA, 2442 bp, Granulicella mallensis
atgtcggaaggccgttgggttttgctgatcgcatccgaagtgggcggcaccgactccgtgtccgatagagcaatggaacgtttggtggaggctattggcaaggaaggttacgaggtggtccgtacctctaccccagaagacggcttgtccttggtgacctctgatccatcccactctgctatcttgttggattgggacctggaaggcgagaaccagttcgatgagcgagcagcccttaagatcctccgcgcagtgcgtcgtcgtaacaagaagatccccatcttcttgattgctgaccgtaccctggtctccgaacttccattggaagtggtgaagcaagttcacgaatacatccacttgttcggcgacaccccagcgtttattgcaaacagagttgatttcgcggtggaacgttaccacgagcagttgctgccaccttattttcgtgaactgaagaaatacaccgaccagggtgcgtattcctgggatgcaccaggccacatgggcggcgtggcatacttgaagcacccgatcggcatggagttccataaattctttggcgagaacatcatgcgttctgacctgggcatctccacctctccattgggctcctggctcgatcacatcggcccaccaggcgaatcagagcgaaatgctgcgcgcattttcggcgcggattggaccttctttgtcttgggcggctcctctacctctaaccagatcgtcggccacggcgtgatcgcacaagatgacattgttttggcggacgcaaattgccacaagtccatctgtcattctctgaccattactggcgcccgacccgtgtacttcaaaccaacccgcaacggttatggaatgatcggtttggtccctattaagcgtttctccccggaaaatgttcaggctctgatcgataaatcacccttttgcgccggcgctccagtgaagaaagccacctacgctgtcgttaccaactccacctacgatggtctttgttatgatgtgaatcgagtggtcgaagagttggcgaagtccgtcccccgcatccacttcgatgaagcatggtacgcgtatgcaaaattccatgagatctaccgtggccgtttcgcaatgggcgttccagacgaaatcccagatcgacctaccatcttctccgtgcagtccacccacaagatgttggcagccttttctatggcctctatggtgcatatcaaactttcccagcgtgcaccattggattacgaccaattcaacgaatccttcatgatgcacggcaccacctctccgttctatcccttgatcgcctctctggacgtggctgcggcaatgatggatgaaccagcaggcccaacccttatgagcgagactctccaggatgcaatctccttccgtaaggccatgtcctccgtggctcaccgtctgcgtgcagctgaacagggatggttctttcgtctttaccaacctgaatatgtcttcgacccgttggatggcgagacctacctgtttgaagaggcggcagacggtcttctcaccaaccgttcctcctgctggactctgaagcctggtgaagattggcacggctaccaggatgaggacatcgcggatgactattgtatgcttgacccttccaaagttaccattctcaccccaggcgtgaacgcacaaggtgttgtgtctgattggggcatcccggccgctattcttaccgagttcttggatggccgtcgtgtggagatcgcacgaaccggcgattacactgtcttggtgttgttctccgttggcacctctaagggtaaatggggcgcattgttggaaaaccttttcgagtttaagcgtctctacgattccgaagcgcccttggaagaggcactgccagagcttgtgctcaagtaccctgcacgttaccgtaacgtcaccttgaaagaactgtctgacgagatgcacatggttatgcagcaattgaacctgagcggcttggtgaatgcggcatgcgatgaagacttcgatcccgtgctgaccccagcccagacttaccaaaagttgctccgtggcgaaaccgagaagatcaaattctccgagatggctggtcgcattgccgctgtgatgctggtcccatatccacctggcatccctatgtccatgccgggtgaaagattgggcggtccggagtctcccgtcatccgtctgattatggcaatggaagagttcggcaagagattccctggctttgaacgtgagacccacggcatcgaagccgatgctaacggcgagtactggatgcgtgcagtgatcgaaaccccgaatggcaagcgaaacggtcgcaacaagcagcgtccaccatcctccgcaccacctgtcaagcgacgcaagaaaaccatcccgttgccaggcgatgactccccattggaacctggtgcaccggttaaaatttccccagagcgt

SEQ ID NO: 383 - DNA, 2259 bp, Rhizobium etli
atggagttccagatggcctttccaatcgctgtgattgatgaggacttcgatggcaagtccgcagccggtcgcggaatgagagacttggcagatgccatcgaaaaagagggcttccgtattgtctccggtgtttcttacgaagatgcgcgtcgattggtccacatcttcaacaccgagagctgctggttggtgtccgtggatggtgcagaagataagaccactcgatggcagttgctgggcgaggttctggctgcgaaacgtcaacgaaatgaccgcttgcccatcttcctgtttggcgatgacaccactgccgaggatgttccagcagccgtgcttcgccacgctaacgcgttctttcgtttgttcgaggataccgctgagttcatggcacgtgccatcgctcaggctgcgcgtaattacttggaccgattgccaccaccaatgttcaaggcgcttatggattacaccttggaaggcgcatatagctggcacaccccaggccacggcggcggcgtggcattccgtaagtccccagttggacaactgttttataccttcttcggcgagaacacccttcgatctgacatctccgtgtccgtgggctccattggctccttgttggatcacgtcggcccaatcgcggaaggcgagcgtaatgcagcccgaattttcggcaccgatgaaaccttgttcgtggtgggcggcacctctaccgcaaacaagatcgtgtggcatggcatggtcggccgtggtgacttggtcctgtgcgatcgaaattgtcacaaatcaatccttcattcgctcattatgaccggtgccaccccaatctacttgattccatcccgtaacggactgggcatcattggcccaatctccaaggatcagttcaccccagaatcgatcgctcacaaaattgctgcgtctccttttgcagcccaaacctctggcaaggtccgtcttatggttatcaccaactccacctacgatggtctgtgctataatgtggatgcgatcaaagcatctcttggcgacgccgtggaagtgctccacttcgatgaagcatggtacgcgtatgcaaacttccacgaattttacgacggattccacggcatctcctccaaccagccagctcgttcccaaaatgcgattaccttcgcaactcactctacccataagttgctggctgcgttgtcgcaggcgtccatgatccacgtccaacatgcagaaaccaaacgcctggatattacccgtttcaacgaagcattcatgatgcacacctctacctctccacagtacggtatcattgcgtcctgtgacgtcgcagccgctatgatggaacagccggcaggccgttccttggttcaagagaccatcgatgaagcaatctccttccgtcgtgcaatgaaccgtgtgaagaaacaggccgagggctcctggtggttcgacgtttgggagcctaccgtggcggaacaaaccccatccgacacccacgcagattgggtcttgaagcctggcgacgcatggcacggtttcaccggactggctgaaaaccatgttatggtggacccaatcaaggttaccattctttccccaggcctctcagcctcgggagctatggatgagcacggtatcccggcggcagtgattaccaagttcttgtcctcccgtcgtatcgaaattgagaaaaccggcctgtactccttcttggtgttgttctctatgggcatcacccgtggcaagtggtccaccttggtcaccgaactgatcaacttcaaagacttgtacgatgccaatgctcctctgacccgagcgttgccggcattggccgctgcgcacccacaggcatacgcaggcgtgggacttcgtgatttgtgcgagaagatccatgccatctaccgcaaggatgacgttccaaaagctcaaagagagatgtataccgtgctgccagaaatggcgctgcgtccagctgacgcttacgatcgtttggtgaagtcccgaatcgaatctgtcgagattgatgaacttatgaaccgtatcttggccgtgatgattgtcccatatcccccaggtatccctctgattatgccaggcgaacgtatcactcagtccaccaagtccattcaagactacttgttgtatgcacgcgacttcgatagaaaattccctggttttgagaccgacatccacggcttgcgttttgcaccaggcgatggcggccgtcgttacttggtggattgtatcgctggcgaagaacaggaa

SEQ ID NO: 384 - DNA, 1470 bp, Geobacillus kaustophilus
atgtcacaactggaaacaccgctgtttacaggtctgctggaacacatgaagaaaaatcctgtccagttccacattccgggccataagaaaggtgccgggatggacccggaatttcgggcgtttattggcgataatgctttagccattgacttgattaacatctcaccgctggatgaccttcatcaccctaaaggcatgatcaagagagcacaagaattagcagcggaagcatttggagcggattatacatttttctcagttcagggcacatccggggcgattatgacaatggttatgagcgtcgcaggaccgggcgataaaattatcgtaccgagaaacgttcataaatcagttatgtcggccatcgtgttttctggagcaacaccaatttttatccacccggaaattgataaagaactgggcatttcacatggcattacaccgcaagcagtcgaaaaagcgttacgccagcatcctgacgcaaaaggcgtcctggtaatcaatccaacatattttggcattgccggcgatctgaagaaaattgtggacattgcacactcctacaacgttccagtgttagtcgatgaagcgcatggagtccatattcactttcatgaggatctgcctctgagcgctatgcaagctggtgcggacatggctgccacgagtgtgcacaaactgggcggctcactgacccaatcaagcatccttaatgtcagagaaggattagtatcagcaaaacatgttcaggcgattttaagcatgttgacaacgacatcaacatcctatctgttgctcgcttctttggatgtagccagaaaacaactggcaacaaagggccgcgaacttatcgataaagctattcgtttagccgactggacgagacgccagatcaacgaaattccgtatttgtactgcgtgggtgaagagattcttggcacagaagccacgtatgattacgaccctacaaaacttattatcagcgtgaaggaacttggtttaacggggcatgatgtcgaacgatggctgagggagacatataatatcgaagttgaactgagtgatctgtacaacattctttgtattatcacgccgggagacaccgaacgtgaagcatcactgcttgtagaagcactgagaagactgtcaaaacaattttcacaccaggcggaaaagggcatcaaaccgaaggttttattgccagatattccagctttggcactcacgccgcgcgacgctttttatgccgaaaccgaggttgtgcctttccatgaaagcgcgggacgtattatcgctgaatttgtaatggtttatccgcctggtattcctatttttattccgggcgaaatcatcactgaagagaatctgaagtacattgagacaaacttggcagcgggcctgccggtacaaggacctgaagatgacacgttgcagaccctccgggttatcaaagaatataagccgattcga

SEQ ID NO: 385 - DNA, 2124 bp, Haemophilus somnus
atgaagcagatcttgattggctactctatgtataacgatcacttgcagaacttgatctccgcactggaagagaagggctacaaaaccactgccgtggacggtcaccaggaaattttgcatgccgtgaagaacaatgcttcgatcatttccgtcatcctgtctaacgacatcattgataaggaccttaccgacaaaatcttgctgcttaacgaagatcttccaattttctccctcaaggacaccgatgacttgaacgagaacttggatttcgcgaccatcggccaccatgtccaatttgttgattgcaacctgtacacccttgacgaaatcattcacaagatcgaacgcgcagtcgagaaatatttcgattctattaccccacctcttactaaggcattgttcaagtacgttaacgaggacaagtataccttctgcaccccaggccacatgggcggcaccgcattcctgagatcacctattggctccgtgttctacgatttctttggcaagaacaccttcaaatccgacatctccgtgtccgtgggagaattgggctccttgttggatcactctggcccgcataaggaagcggagaaatacatcgcaaacgtgttcaacgccgaccgttcttatattgtgaccaacggcacctctaccgctaacaagatcgttggcatgtactccgcgccctctggctccaccgtgttgatcgatcgtaactgccacaagtccttgacccacttgttgatgatgtcggacgtcaccccgatctacttgaaacccactcgaaacgcctatggcctcttgggcggcatcccagaacaggagttctccaagtccgctatcgagaagaaattggcggatattgacaacccaaattggcctgtgcacgccgtcatcaccaactccacctacgatggtttgttctataataccgacaagatcaaagaaaccttggatgtgaagtccattcactttgactcagcttgggttccatacaccaacttcaatcctatctatgagggtaaaactggaatgggcggcaagcgtgtggaagataaaatcatctacgagacccagtccacccacaagctgcttgcagccttttctcaggcatccatgatccacattaaaggccaaatcaacgaagagaccttcaacgaagcgtacatgatgcacacctctacctctccacactatggcatcgtctcctctaccgaggttgctgcggcaatgatgaagaacaataccggtaaacagctcttgcaagatgcgatcacccgtgcagtgcgtttccgtaaggaaattaaacagcgcatgagagagagccaatcatggtacttcgacgtctggcagccggaaaacatctcctccaccgaatgctgggagctgaagccaggcgagtcctggcacggtttcaccaacatcgataagcaccacatgtacttggacccgattaaagtcaccctgcttatgccaggcctgaacaaggataatacccttgacccgaacggtatccccgcaactttggtgtccaattacctggattccaagggcatcattgtggaaaagaccggcccatataacattctcgtgttgttctccatcggcattgatgacaccaaggcaatgtcattgatccaggccctggatgacttcaagtccttgtacgatgcgaacgttcttgtgaaagacatcctcccaaatatctacgcccacgctcctaagttctatgaaaccatgcgcatccaagagttggcaggcggtatccacagactgatttgcaaacataacttgccagatttgatgttcaaggcttttgacatcttgccgaaaatgattatgaccccaaacaaggcattcaacttggaattgaaaggcaacatcgatgaatgttacgttgaggacatggtgggcaagatcaacgcaaatatgattcttccatacccaccaggcgtgccattgatcatgcctggcgaaatgattaccgaagagtcccgtgccatcctggaatttcttgtgatgctctgtgagattggcacccactaccctggcttcgagactgacatccacggcgcttaccgtcaggatgacggccgttacaaggtgaaaatcattaacatc

SEQ ID NO: 386 - DNA, 1422 bp, Sediminibacillus halophilus
atgaatcaggatctgacaccgctgtttggcgcattacagacattttcacagaaaaatccgatttcatttcatgttcctggtcacaagaacggcaaaatttttacggataacggactggaaattttcgagaaactgcttcaaatcgacgttaccgaattaactggtttggatgatctgcatgtggctacaggggccatcaaacaggcgcaaaatttggcagcgagctggtttggcgctgatgaaacatttttcctggtcggcggatcaacaacgggtaatctggcgatgatgctgaccgctgccagactggggcgcaaagttcttgtgcagcgcaattgccataagtccattcttaacggcctggaactgagtggagctgagcctgtctttgtagctccagcctatgatagacgcgtaggacgatacacagcaccgacgcttgataccattcgccaggcgatcgaccaatatccggaaattggtgctatcgtcttaacgtatcctgattactttggcacagtattcgatctgccaagcgttgtggaactggcccatcagagaaatattgcagttttggtggatgaagcgcatggtgtccacttttcgctgtcagaagtattccctgcatcggcactggaactgggagctgacctggtcgtacaatccgcccataaaatggctccggcccttacaatggcgtcgtatctgcatatcaaatcacacattatcgatcgtggcgacgtggctcactatctgcagatgcttcaatcaagctctccaagctacccgcttatggcatcactggatctggcgcggtactacttagctggaattaaagaaaacgaactgaaccctattttagaatcaatcgcccgtttacgggaggtttttagctcagcagaaggctgggaggtgctgcctaatgaagccggaaaagatgacccattgaagattacactggaagtcgataaaagatggagcggcatccaggtagcaaaactgtttgaagaacaagacatctatcctgaactgtcaacagagaaccaggttctgtttattcatggcttggccccgttccaggaatgggagagacttcaaactgcagtggagaaaacaagccaacgtttaaagtttttgccgaatcgggatacaattggctctgtccagatcgaacaacagcaaatccattcactggaagtttcataccaaacgatgaaccgaatgaggaaagagtttattggttgggcatctgctgagggcaaaattgcagctcaggcggttattccatacccgcctggcatcccggtgttattgaaaggagagaaaattacgtctgtccatatcaagatgatcaactatctgattaaacagggcatcaacttccaaaaccacaacatcgaacaaggaatgtactgtcttcgt

SEQ ID NO: 387 - DNA, 1413 bp, Phormidium willei
atgctgcaaagcaagactccttttcttgatgcattaaaagcggaagctaactcaagccatacgccgttttattttccgggccacaagcgtggtcaggggatcgcgaatccgcttaaaaactggctcggtctggaaatgtttcaaggcgatctgccggaactgcctcagctggacaatcttttccaaccacaaggcccgattaaagcagcgcaacagttggctgccgcagcgtttggagctaaacaaacctggttcctgactaacggttctacagctggcgttattgctgccattcttgccacgtgcaatccgggcgataaagtgctgcttgcccgcaacagccatcagtgtgccatcgcaggacttattttagcagcggctgaacctgtttttattcaaccagattatgacccgcagtgggatatggtccttcgtgtaactccggaagcactggaaacagctctcaagcaaaattctgatattaaggcagtcctcgttgtgtcacctacatatcatggcatttgctctgatgtagctagactggctgcatgctgtcatagacatggcattccgcttattgtggatgaagcacatggcgcacatctgggatttcatcctcaattcccagcgtcagctttgcagggcgaagcagacctggtcgtacaatcaacacataaatccttaacagccttgtctcaaggcgcaatgcttcactatcagggagatcgtatctccccagaccggattcaagctgcactgccgctcgtccaatcaacatcgccgaactcactgatccttgcgagcttagatatggctcggcaacagattgccacagaaggataccaacagttgcaagactgtgttgagatggcacaacagctgcgatcacatctgagccagctgccgagtgtggcattatcaccgcatgcggatgaccctagcagattaacgttgcgcatcggtcaattgaccgggtatgaagcggatgagcagctgacagaacattttggcgtgattggagaactgccgcaattacatcatctgacgttcgctctcaccctgggcgatagaccgccggatggagacaggttattgaatgccatcagacatctggcgcaatctgctccgattccttcaccgctgtcatcacaggatctgagtccgattccgccggctattatgacaccgagacaggcccattttgcaccgaaaaagaaagttttctttcacaagacaagcggcgaaatctgcggagaactgatttgcccgtatccgccgggcattccgatcttaattccgggcgaacggatcacagagacggcgctcattcatctgaaagaaacacttgccgcaggcggagtattaacgggttgccaagataccagtggggaatttttatcggttgtggaccgt

SEQ ID NO: 388 - DNA, 2133 bp, Francisella noatunensis
atgaagaccattgttttcgtgtacaaggacactttgaagtcctataaggagaagttcttgctgaagatcgaaaaggatttgcagtcctacgaatatcacaccttgactgtggatgacctgtctgaagtggtcgagatccttgaagataactcccgtatctgctgcatcgtcttggaccgaacctctttctctattgaagcctttcacaatatcgctcacttgaacaccaagctgcctgtgttcgtggtgtccgattactcacagtccatcaagttgaacttgcgtgacttcaaccttaatatcaacttcttgcaatacgatgccttggctggcgaggattccgacttcatccacagaaccatcactaactacttcaacgacatcttgccaccattgacctacgaactgttcaagtattccaaatctttcaactcctctttttgcaccccaggccaccagggcggttacggattccaacgttccgcggttggcgcattgttctacgatttctacggtgaaaacatttttaagaccgatttgtccatctccatgaaagaacttggctccttgttggatcactcggaggcccataaggacgctgaagagtacgtggcgaaagtcttccaggcagatcgttccttgattgtcaccaatggcacctctaccgcgaacaagatcgtgggcatgtacagcgtcgcagatggtgacaccatcttggtggaccgtaactgtcacaagtccgtgacccacttgatgatgatggtcgatgttaatccgatctacttgaagcccacccgaaacgcctatggcatcatcggcggcatcccaaaagaagagttccagcaccaaaccattcaggaaaagatcgataactcctccatcgccgacaaatggcccgagtacgctgtcgttaccaactccacctacgatggcattctgtataacaccgacactatccaccatgagctggatgtgaagaaacttcacttcgacagcgcctggattccatacgctatctttcaccctatctacaagcataaatccgcaatgcagatcgagccaaagcctgaacacatcattttcgaaacccagtccacccataaattgctggcagccttttcccagtcctccatgctgcacatcaagggcgattacaatgacgaggtgttgaacgaagcgtatatgatgcatacctctacctctccgttctaccccatcgttgcatccgtggagaccgctgcggcaatgatggaaggcgagcagggatacaacttgatcgataagaccattaacctggccatcgacttccgtcgagaattggtcaaactgcgctccgaggctggcgattggttctttgacgtttggcaaccagacaatatctctaacaaggaagcgtggcttctcagaaatgctgataagtggcacggtttcaaaaacattgatggcgatttcttgtccttggacccaatcaagattaccatcctgaccccaggcatcaaggataacgacgttcaggattggggtgtgccagcggacattgtcgcaaagttcctggatgagcacgacatcgtggtcgaaaaatctggcccttacagcttgttgttcatcttctccttgggcaccactaaggccaaatccgttcgtcttatctctgtgctcaacaagttcaaacaaatgtacgatgagaacaccctggttgaaaagatgcttccaactctctacgctgaagatcctaagttttataaagacatgcgtatccaggaagtgtccgaaagattgcaccaatacatgaaggaagccaacttgccaaacctgatgtatcacgcattcaacgtcctcccggagcagcaattgaacccacaccgtgcgtttcagaagttgctcaagggcaaagtcaagaaagttccgcttgcggaattgtacggtcaaacctctgcagttatgatcttgccctacccaccaggcatcccagtgatcttccctggcgaaaaggtcaccgaagagtccaaagttattctggacttcttgctgatgcttgagaagatcggctctatgctgccaggttttgataccgacatccacggtcctgaacgtgcaaaggatggcaagttgtacattaaggtcatcgatgac

SEQ ID NO: 389 - DNA, 1389 bp, Prochlorococcus marinus
atgtccatctcctccttcttgaccaagaaatttttgaagtctctgttctttccggcacacaatcgtggcgcagccttgcccaagaaactggtgaagttgctgaaaaaccacccaggctactgggatcttccagaattgcctgagattggttccccattgtcacagtcgggactgatcgcaaagtcccaacgcgagttctccgacaagtttggagcaaaaggctgcttctttggtgtcaacggagcctccggcctgattcagtctgcagtgatctctatggcaaacccaggcgaaaacattttgatgcctagaaacgtgcacatctccgtgatcaagatctgtgctatgcaaaacatcaacccaatcttctttgatctggagttctctaccgtgactggtcattacaagccaattaccaaaatctggcttgataacgtcttcaagaaattgaacttcgacgaaaacaagatcgctggcgtcatcttggttaacccatcctaccacggttatgcgggcgatttggaacctctgatcgactgctgtcaccagaagaaccttccggtgttggtggatgaagcacacggctcctacttcctgttttgcgagaacttgaacttgccaaagcccgctttgtcctccaatgcggaccttgtggtgaactccctccacaagtccttgaacggcctgacccagactgctgcgctttggtataagggaaacttgatcaacgagggcaacctgattaaatccatcaacttgttgcaaaccacctctccatcctccttgctgttgtcctcctgtgaagagtccatccgtgattggctgaacaagaaatccctttctaagtaccaaaaacgaattttggaagctaagatcatctacaagaaactgatccagaagaacattccgttgatcgagacccaggacccattgaagattgtcctcaacacctctaaagcaggcatcgatggtttcaccgccgacaagttcttttaccgtaacggcttgatcgcggaactgccagagatgatgacccttactttctgcctcggctttggtaatcagaaggatttccttaacttgttcgaaaaactgtggaagaagttgttgttgaactccaagaagtccaagtccttggaagtgttgaagtccccattcaagttcatccaagctcctgaaatcgagattggtatcgcgtggcgttccgaaaccaagtctatcccattctccgagtccttgaacaaagtttccggcgacatcatctgcccgtatccacctggcatcccgcttttggtgccaggcgaaaagattgatctggaccgtttcaactggatcaacaatcagtccttgtgtaacaaggacctggttaacttcaatatcaaagtgttg

SEQ ID NO: 390 - DNA, 1413 bp, Phormidium willei
atgctgcaaagcaagacaccgtttctggatgcattaaaagcggaagctaactcaagccatacgccgttttattttccgggccacaagcgtggtcaggggatcgcgaatccgcttaaaaactggctcggtctggaaatgtttcaaggcgatctgccggaactgcctcagctggacaatctttttcaaccacaaggcccgattaaggcagcgcaacagttggctgccgcagcgtttggagctaaacaaacctggttcctgactaacggttctacagcaggcgttatcgctgccattcttgccacgtgcaatccgggtgataaagtgctgcttgcccgcaacagccatcagtgtgccatcgcaggacttattttagcagcggctgaacctgtttttattcaaccagattatgacccgcagtgggatatggtccttcgtgtaacaccggaagcactggaaacagctctcaagcaaaattctgatattaaggcagtcttagttgtgtcacctacatatcatggcatttgctcagacgtagcgcgcctggccgcatgctgtcatagacatggcattccgcttattgtggatgaagcacatggcgcacatttaggatttcatcctcaattcccagcgtcagctttgcagggcgaagcagacctggtcgtacaatcaacacataaatccttaacagccttgtctcaaggcgcaatgcttcactatcagggagatcgtatctccccagaccggattcaagctgcactgccgctcgtccaatcaacatcaccgaactcactgatccttgcgagcttagatatggctcggcaacagattgccacagaaggataccaacagttgcaagactgtgttgagatggcacaacagctgagatcacatctcagccagctgccgtcagttgcattatcaccgcatgcggatgaccctagcagattaacgttgcgcatcggtcaattgaccgggtatgaagcggatgagcagctgacagaacattttggcgtgattggagaactgccgcaattacatcacttgacgttcgctctcaccctgggcgatagaccgccggatggcgatagattattgaatgccatcagacatctggcgcaatctgctccgattccttcaccgctgtcatcacaggatctcagtccgattccgccggctattatgacaccgagacaggcccattttgcaccgaaaaagaaagttttctttcacaagacaagcggcgaaatctgcggagaactgatttgcccgtatccgccgggcattccgatcttaattccgggcgaacggatcacagaaacagcgctcattcatctgaaagaaacacttgccgcaggcggagtattaacgggttgccaagatacatcaggggaatttctgtcagttgtggaccgt

SEQ ID NO: 391 - DNA, 2139 bp, Pyramidobacter piscolens
atgaacgttttgctgcttctcggccgtgcatccgactctatcttcgattccccagaagcagccgagctttttgaagaattggaaaacaagggttaccgcctgcagagacccgaattgcacggctccttggtggatatgcttgaacaacgtccagaggctgcgggcgcgatcattgactgggatactatgggcggcgaattgtacgcatctatgggcgaattgaacgagcgtttgcctttctttgccttgacctctccggcagccgctaaggaactgcagccacctgagaaggacaagttgaccctggcattcgttccattgccttgcagatccgctgagagagcggcagccaagatcgatcgcgctgtgcgtcgatacttcgaattgctgcttccgccctttacccgtgcgttgttcaaatttgctgcggcaaagaaaaacactttctgtaccactggtcacttgttgggctccgcttttcgacaccatgcaatgggctgggcatactataacttctacggccctaatgcctttcgcgctgacacctctgtttccgtcccagatatgggttccctgcttgaacacaccggcgcacacaaggacgctgaagaattgatcgcgcgcgcattcaacgctgatagatcctacattgtcaccaacggcacctctaccgcgaacaagatcgtgggcatgtattgcgtctcacagggtgacaccgttttgattgatcgtaactgccacaaatcgatgactcacttgttgatgatgtgtgacgtggtccccatctacctgcttccaacccgaaatgcctatggcatgatcggcggcatcccagcggatgagttcacctctgaggcaattcactacaagctgtcacaacgtgatgacgccacttggccgacctacgcagtgatctccgactccacctacgatggtctcttgtatgactgctcctggatcaaggctaacttgcctgtcaagaaaattcatttcgattctgcctggagcccatacgctcctttcaacccgatctacgaaaacaagtttggcatgtgtggagagccaactgcgggcaagaccatcttcgaaactcagtcggcgcacaaaatgctggcatccttcgcccaggcatcctacgtgcatgtgaagggtgaatatgacgagtctgtcttggatgaggtttacatgatgcacaccactacctctgcaaactatccaattgtggcgtccgcagaaaccggcgccgctatgatgactggcaaccagggccgtcgtttgcttcagaactccatcgatcgtgccatgaccttccgtcgagaattggctcgattgtacgacgagtcagatacctggttctttaagtgctggcagcccgatgacatctctgaaaccaaatgttggccaatctcccgtggcgaacgatggcacggcttcttgggcgccgacgaagattttaactacttggacccaattcgtgtgtccgtgttgaccccaggcatggacccaactggtcaactgatggaagagggcatccccgctgcagtggtgtcccgttacttgaacaaccacggcgtcgttactgagaagaccggcccatatcacatgttgttcttgtttgcactgggtgtggatgaacttcgtaccaaggcattgttgcgagcattgcaggacttcaaacgcgattacgatgacgatgtgcctatcagagaagccatgccggacctgttcaaacttgatcccgtcttttacatgcgtatgtccctccagcaattgacccgtggcctgcaccgagtgatgcgtaagcgagacctgccaaaacttatgtaccatgcatacgatgatttgcccgaaatggagtacaccccatatcaggccttccaaaagaaccttcgtggcgaaacccacgaggtccctttggcggagctgcttggtcaggtttctgcagatatgattctgccgtacccacctggtgttcctcttgtgatgccaggcgaaaaggttaccgagaaatccgccgctgtgttggattacttgaatatgctgtgcgaaaccggagagctgttcccaggctttgatactgaaatccacggcgcataccgtcgtaaggacggttactatgtgaaagtcttggatgaagag

SEQ ID NO: 392 - DNA, 6747 bp, Plasmodium ovale
atgaatacggcgaacgatgctatgttctactcagctaacaacttcgtctacgccgtaaatttctcagaaaacaacccagagaaggaaacaaaatcaatgaacgaaggaaacgattgcattccgtcaagcaacgcattatcagaagaactgggtagcgtggcagaacgcgacgaggtcgcgtccaatgattcaatttgcagaaatcgcaacgtgtcccgtaatggaaacgcaaattcaaacatcatcacgaaccttagcaaaaaccaatctgccattcagtcttccatcaattccgctattcatagtgccatccattcatcaatccaaaattcaatccagtcaagcattcaaaacgtcatcccgtcaacatcaagacatcactataaagatgcgaaggacttaagccagaagtggaagaaagaagaatcttaccaaatcggctccagacgccgtgagaaaaataggttgaaatcttccaagtatgagaagatcaacgtactggaaagatacatcaacatctctaacgctacgaatgtttgctccctccgcattaaactgtgggaagccttgatgctctatgtgaacaaactgcatcttgaatttgtctacttcatcctcaactgtctggaagagatcgaagtttattggggcgaagaagcaacaaacaacttgcaggatattctcaacttggtaaacgataagaagtacaaggacgttctgtacaagattggcgaaatcctgtcatcactgtcagttacaacgtcaaaaagcacggaagagaatccgtttttctatacccttattgtcagcgccaaacgtgacgaaaacaacaacaacaacaactacaactcggatctttcatgcgaactgtctaaaattatccagtacgaacataatcggttgtcaaaccaaaacaacaacaagaaactggaatacaagattatcgaagtttcaaatgccaaagaagcactgcttgcgtgtctgattaactcgcagatcttgtcagttgttctggttgataatctggtcattgacgaagaatttacaaaggaaaaggattacttcccgtacatcgatgacaacgcacttaacaataactgcgtgaacaacagctatttattgaactgtaacaccacaaattcaactcaaatcaaaacaccgctgagccataatatcggtaataacggcggctcaccgggcaacaaagatacagtcagaggctcactttcaagctgccgccataacattagcaatggccagatgtgcaatcatggccaaatgtgtaatcatgagcattcaagatcatcaggatctgaatccaaacggcaatcatcatttctgctgaagcgagattataaattcgaaattggcgactttgtgttgggatacgatcaactggttgcagcgccgctggaaaagatgaagaaaggctacaactcattggtgattctcatcaaaagcattgcgtacatcagatcatcagttgatattttctgcgtctgtacatcaatcacactggataaacttcaatccgtgaacaacaagatcatccgcatcttcacaacgcatgatgaccacagtgaccttcatgaatcgattttagatggagttaaaaagaaaattaagacaccgtttttcaatgctctgaaaagctatgcagaaagaccgattggagtatttcacgctctggccatcagcaagggtaactctgttagaagatcaagatggattcagagccttttagatttctacggagtcaatctttttaaagcagaatcttccgcgacatgcggcggcctggattctttgttagatccgcatggctcactcaaagaagcacaaattatggctgcaagagcgtatggctcaaaatactgctttttcgttacaaacggcacatcatcatcaaataaaatcgtaatgcaggcacttgttaaacctggcgatattatcttagtggacagagcgtgccataaatctcatcactatggatttgtcctttgccaagcattaccttgttatcttgatccgtacccggtttcaagatatggcatttacggagcagttccgatctacgttattaagaaaacactgcttgaataccgcaatagcaacaaactgcatctggtgaaactgttgattcttaccaattgcacttttgatggaatcgtttataacgtgaaacgtgtcgtagaagagtgtctcgctatcaagccggacctcatctttttgttcgatgaagcctggttcgcgtatgcatgtttccatcctatccttaagttccgcacggctatggccgtggcagataagatgcgtagcaaggaacaaaagaaagtttactacaagatccataaacgtctcctgaaaaaatttggcaatgttaactctcttcacgatgtcccggtagactatcttttaaagacaaggctctaccctaacccaagcgaatataaagttagagtgtacgcaactcagtctattcataaatcactgacatctctgcggcaaggatcaattatcctgatcagcgatgacaattttgaatcacatgcttatacgccgttcaaagaagcctattacacgcacatgtcaacatcacctaattaccagattcttgcgacactggatgctggccgcgcccaaatggaactggaaggctatggcctggttgaaaaacaggtcgaggcagcgtttctgatccgtaaagaacttagtgaagatccgatgatttcaagatacttccggatcttaaacgcagaagatttgattccagactcactccggcaatgcgcggtaagctatatgaagcgaaaaaacaagatctactcaaaagaaggctcaccgtcactgtctaaatgcagcgataacgtcacatactcctgtatcagtaacaacatcgcaaaacgcgcgacggatcaatctgaaaacaccaagtaccgtatttgccataagaagcctaactttagctcttgtgaaggcgtacacgaagttgtggagtcagcaacgggcctgggcgttaccttttcgaacgattcacatatcagcaatggtttcgtttcatcaggctcaggcagatatgaatcctgtaacccagcgagaggcaatcgtctgcgggaaggtcatctgagagagggcagatttcaggaaaaccacttttctgggaatgacccgcaaatgtcaagagttacagatggcaaaaagaaaaagaaaaaacgcaacgatatttcatcagttacgcatgatgacgataattctaacgattccacaaattcagagaatgaatgcttcagtatcgaagagtcaagagaaaacaagaacggaaactgctcttgtaacagctctaactacctcaacaattttctggaatacttcgagtgttcgtggttatcagaggatgaatttgttttggacccgacacgcattacactgtttaccggttattcagggatcgatggcgacacattcaaggtgaagtggcttatggataagtacggcattcagatcaacaagacatcaatcaactctgttctgtttcaaacaaacatcggcacaactggctcatcatgcctgtttctgaaatcatgtctgtcactgatttcacaggaacttgaccaaaagaaaacactgtttaacgaaagagatttgaaccagttcaacgaatcagtttacaaccttgtttcaaactacatcgaattatcacaatttagcggcttccatccgctttttaaaaaacgctacagcacatcatcaatcttcaatagagaaggcgatctgagaaaagcattttatctggcgtatgaagaagattacgtcgtatacatcttgctgctggatctcaaggagagaattaaaaagaaagaaatgatcgtttccgcatcatttattatcccttatccgcctggattcccagtcctggttccgggccagattatcagcgaagagattgtggactatttgtctggcctgtcagttaaggagattcatggttacgatgaaaacatcgggtttagatgcttctacaacttcatcctgaactacttctaccacatcgtgacgtctgatccgtatgcgtactaccaaaagatggataagaaaacgtatgataaactgaaactgtcatcactgaacaaaaagaaaaatacagacgatatttaccatttatatatctacgataaggaccgcaacaaactgaagaaaatttacttgagaaacggccgcaatgcatcaacagacaataacacaacagtttcagatagctatgaagaagttacaagctgctctattccacatatcggtccggttagaagatgcgtcccggcaatttcatcagtttcagcagtttcaggcggctcagcaattggccgtatcgatgcgcaaaaacagtgctctgagaaagaagataacttctgtgacgttaacggggaaaatggcttgtcaaacgatatttcatcactgaacaactcagaaaacacatcaccgcagaaaaaatcatcaacagaatctatcattaagaaaggccattacaatgaatccacgatgaagggcaagaaaaatctgagaaagtacatttcagtgcctaacaacatccgaaccgatgaatacaacgtctttctgagcaagatcaaagaaggcgaatttgagatcatcggcacaccgaagaacgataaccgtaactttcttgttaacagcgcaaattgctactacaacaagaaagcaaaggatctcatccggcagacaaacggattcaagaaaatttacaaggaccatactcacctttgcacagaagataatttaattgtggatcgtgacatctgtaattcatcaggatcaaacggtcaaaaccatttcgaaagaaagaaaaatatgatcaagaacgatttaccgttgagcaatcgggaagaagttggcatggaagttgagaactgggaagaagcaagaatcggaacagcgaactgggagaaagtacctaatggtgaacatctttctaacgttgtgtttaagaaacacagaggcgatgttattttcgaagaagatagactttcagtacgccgtacttgtaacgttggtatctctcatcggttatcaggcagaagaagaggaaatgtcagcacagcaaacccagaaaatgcaattttacaagcgggacaggttaatgcggtgcggtctaagccgggtaaaggcacaggccgtggagttggtaaaaatcggaacggcattatcactgaaagaggcaacattccgaatggaagcatcacaaacaaacagaatatgctgtattcctttagtgatgtgtactctattcggcaagtcgggaagatgaataacaaagatggcgaaaagtatgaccatattttgacggatgtcgtacctaaaatcaagcagtctaacatcatcctgtacaacaagattaacaacaattctatgttggtacaacgaaaaaggctctccaacgttaacgattacacatgcaacctcaacgagaaaaataaccataaggaatacagaggaaaggacttcgtatgttactcggattcaaacaagaaaaataagaacgtcatgtatgtaaagcacgaagaagaatacgttaaagaagaaagcgatcaggacattaacgaaaacatcttcgagtacaacaacaaactgtttcgtgttaatcgggtgattggcaagaaagaagatgataacgggatcggctcaacaggcgttattcgcggccataatatcgagatgtctcgttgccttgaatttactcaagggcagccgacaagagaagaaaagaaaggcagggatatgcactcaaatgtcaacagcgtatctaacgttagaaatttaactaacggctcatcatcaatgggcaatagaattagagctgggattatcggcaacagatcaagaggcagaacaagagttaaaaaacagtctaacagatcttccatgcaagaacctctggcccatgtgagctatctgccggaacagaatattaaaagaaacgtcgaggaaatgtacattgaaggagagccgatcagagaacgcgatacggagcaaaacgtgtttatcagtaaagtcccttcggaacgcgatggcctgaatggaaaaggtctgtcacatacccactgcccgaatgaagctaaaagccataactatgccaatgaaaacatgtgtactgacatgaattacgtgacaaaagaaggagatatggaaggcgttgtgaatgggaacgctcacgaatatcctaatgagggatcaaacggtcttgttaacgtgctcgccaacgataattcatcatttaaatcaagccaaaaatcatcagattcatcaaattgccgcgatgaatgggggcaaatgggcgacgtacatttgaactttgttggaaatgatcagggacatggcaaactgaacacgcaagaaaagatcgaaacagagatctgtagatcatcatttccgttcaacgaaaaagaactgaataaagatccggtccttttagaaaacgctggcgatagaaattcaccgagaaaactgaacacgcttaacaacaactcatacatcaacaacctgatcactaacgtagacgatgacacattcgttcataaagaaggcaatttctttctggaatgcgccatgacaaacagcgagatcaactgttcttcctttgaaatggatatgagcctcaacaacatctactctcatgatggagacggtatcgggcaacacatgcacagaggcggcgataagaaaggcgaatttaaa

SEQ ID NO: 393 - DNA, 1563 bp, Pseudomonas aeruginosa
atggataaggataactctatgtctcgaaacaacccctcccgccactctattctggtgacctctaacatcaacgcagcaaacgacgctaaccgtctgtccgagctgtgtcgtcagttggagattcgtggctaccgactgttccaagccccatctcgtaaagtcgccctggactttctgggcaacgcggcacacccagcaggcattttgcttctggtggcagaacccaccggcgaaaacgaggcagcacaattggcagcgctggacgagttgcgacaagtcgcaccctccatcccactgtttctgctgttccgtcaactgcgtattgaacagctttcttcccaacttctggatgaggtgcaaggttgttttaacctggcagcggttccagcgcgtttcatcgcggaacgcattgactctgatttgcgtgaatggcgcgcaccagcaggtccgcgacgtctgcgtgattacgcgccacccgttccccgtaccccagtgtccgcacgttataacggtcgtgcccgtctggatctggcgcccgctaaacaatggcgcatcggctccgaatccaccgcggagcacctggcaaccccactgaacgacctttctaccgcataccgtaaaacctctgcaggcgcacccgcagcacacgcgggtgacattgcagaagcatttcgtcgcgcactgtgggaggcggcagctcgtctggcacgagaagatggcgacacctggtttttcgagattctgcgtggtaacccaggtcctggcattgaggcgggccgtgagacccctgcaaaacgttggcacggtctggcggagaccctggattcttccccactgcttgacccactgcgtgtggcactgtctgcgcccggtcttgattcccgtggtcgtccagcgtccttcggtgtgccagcagcagtggtgtgccgctacctgcgtcgccacggtatcgcaccgttgcgtaccggcgactaccgattcctgcttttgtttccacaaggtgcacgtgcagaacacgcacaacccctggtggatcgtctgtgcgagtttaaacgtcgtcacgatgacaacgcgccactgaagcaagtgcttccagagttgctggactcttccccattgtaccgttatatcggcctgcgtgagctttgtgcaatgatccacgaggcatccctgcgtcttcacctgaccgcgctggctgatgccgcggcacgtgcagcgggtcacgcagccctggcaccggcgaccgtgtatggtcacctggtgcgtgatgagaccgaggcggtcgcaatcgatcgactgggcggtcgtgtcgtcgcatctcttgtcggcgtgcacccagcggcggcacctctgctgcttccaggtgaacgtgtcgcggacgaatctcccgcactgattgattatcttctggcacttcaggcgttcggtgagcacttcccaggtttcgcacccgagctgcaaggtattgaaatcgacgagcgcggtcgttatcgtgtccgatgtgtccgacctgctgctcttgcccgaggctctggcttgcgactggcgacccgacgacccgac

SEQ ID NO: 394 - DNA, 1464 bp, Caloramator australicus
atgtataagatggatcagacccaaaccccaatcttcgacgctctgatggagtaccacaaccgcgataccgttccatttcacgtgcctggtcataagcgtggcgatggtatggacaacaagttcaaagactttgtgggctctaatattctgagcatcgatgtcaccgtgttcaagttggtggattccctgcaccatccgaccggcccaatcaagaaggccatgcagttggcagccgatgcatacggctccgacatggcttttatttcaatccacggcacctctggagctatccaggcgatgattatgtccgtggtcaaggaaggcgataaaatcattatcccgcgtaacgtccataagtccgtgaccgcgggtattatcttgtccggagcagtgccagtctacatgcagcctgagatcgacaaaaatattggtatcgcacacggcgttaccccagaaactgtggagcgcaccatcaaggaaaacccggatgctaaagcggtcctgatcatcaaccccacctactatggcgttgccactgacattaagagaatcgctgaaatcgttcactcctacgataagatcttgatcgtggacgaggcgcacggcccacacttgggtttcaacgataagttgcctatctcctctatgcaggcaggcgccgacatttgcgctcagtccacccataaaattatcggctccatgactcagtcctccttcttgcaagtccgtgcgggccgagtggacatcaaccgtgtccagcaagttatgaacttgttgcagaccacctctccatcctaccctcttatggcatccttggatgtggcgcgaatgcaaatcgcaaccaagggtaaagaattgttggatcgtgctattgaattggcggagtatacccgagagaagatcaaccagattccaggcttgtactgtttcggtaaagaaatcctgggccaaccgggtgtctacgcacttgatcccaccaagatcaccgttaccgtgcgtggcttgggcctcactggctacgaggttgatcagatcctggcggacgaatatcacattcaaatggagctttctgatttgtacaacatccttgcagtgggctccttcggcgataccaaggaaaagatggacaagtttatcaatgccctgaaagatatttccgaccgctactatggcacccgtgaagtgaagggcgaagtgttggacatcccggcaattcccaaacaggtcttgaccccacgacaagcattcaacgccaagaaatggtctttgcctctgcacgactccatcggcaaggtgtccggcgaatttttgctggcctacccacctggtattccgatcgtgtgcccaggcgaaattatcacccaggagatcgtggattatgtccaagcattgaaggacgccaacctgtacgtgcagggcaccgaagatcctgacgtcaatttcatcaaagttgtggatattgag

SEQ ID NO: 395 - DNA, 2211 bp, Klebsiella pneumoniae
atgcgctgcgcacgtggcatcgcaatgatgcttgatttgggcgagtaccaggaagagtccgtgaacatcattgcgatcatgggtccacacggcgtctaccataaggatgaacctattaaagaacttgaggcagcattgcagcgtcaaggtttccagaccatctggccacaaaactccgcagatttgctgcaattcattgaacacaacccacgtatctgcggcgtgatttttgattgggacgagtactcagtggatttgtgttcggacatcaaccagcttaatgaatacttgccactgtatgccttcattaacgctcactctactatggatgtgtcctctcaagatttgcgtatgaccctgtggttctttgagtacgcgcttggtctcagcgaagagatcgcaacccgaattggccagtacacccgtgaatatttggagaacatcaccccaccattcacccgtgcattgttcaactacgtgcaggaaggcaagtataccttctgcaccccaggccacatgggcggttccgcttaccaaaaatctcccgtcggctgtttgttttatgacttctttggtggcaacaccctgaaggcagatgtttccatctccgtgaccgaattgggctccttgttggatcacaccggcccacacttggaagccgaagagtacatcgcccgtgctttcggtgctgagcagtcctatatggttaccaacggcacctctacctctaacaagatcgtgggcatgtacagcgcgccagcaggctccaccttgctgattgaccgtaactgccacaagtctttggcgcacttgttgatgatgagcgatgtggtcccgttgtggctgaaacccacccgtaatgcacttggcatcttgggcggcatcccacgtcgagagttcacccgtgatagcatccagcaaaaggtccgtgataccggcggtgcccagtggcctgtgcacgctgtcatcaccaactccacctacgatggcttgctgtataataccacttggcttaaggaaaccttggatgtcccgtcgatccacttcgattccgcgtgggttccatacacccactttcatcctatctaccagggcaagtccggaatgtccggcgaacgtatcccaggcaaggtcatcttcgagacccagtccacccacaaaatgttggctgcgctgtctcaggcatccttgatccacattaagggcaactacgacgaagagaccttcaacgaggcgtttatgatgcacacctctacctctccatcataccctatcgttgcaagcattgaaaccgcagccgctatgttgcgtggcaactccggcaagcgcctgatccagagatcgattgaacgtgccttggatttccgaaaagaggtgcaacgcctgagagaagagtccgacggctggttctttgacatctggcagccagaagcggtggataaggcagagtgctggccggttgcaccaggcgaggattggcacggctttaaggatgccgacgctgatcacatgtacttggacccagttaaagtgaccatcctgaccccaggcatggacgaacaaggaaacatggatgaagagggtattccggcggcattggtggcaaagttcctggacgaacgtggcgttgtggtcgagaaaaccggtccctacaacttgttgttcttgttctccatcggcattgataagacccgtgcaatgggcttgctgcgtggtctgactgagttcaagcgagcatacgaccttaacttgcgtgtgaagaacatgcttccagatttgtacgccgaagaccctgatttttatcgtaacatgcgaatccaggacttggctcaaggcatccaccgccttattagacagcatcaactcccacagttgatgctgtctgccttcgatgttctgccggaaatgaagatgaccccacaccatgcttggcagcgacaaatcaaaggtgaagttgagaccattgaattggagaacctggtgggccgcatctccgccaatatgattttgccgtacccaccaggcgtgccacttctcatgcctggcgaaatgatcaccgaagagtcccgagctgttttggacttcttgctgatgctgtgttctatcggccgccactaccctggttttgaaaccgacatccacggcgccaagagagacgaggatggagtgtatcgtgtccgagttcttaaaaacgatgaacgtttggctcga

SEQ ID NO: 396 - DNA, 1533 bp, Synechococcus sp.
atggttctgtctcatctttccaaagcatcaagaagactgagactgcttgatcgcaaagctcaagaacgtgcccctctgtttgaggcaattcggcattattgctctcttgataaagcgccattccatacgccgggacacaagcagggtagaggcattccggcagaccttcgcgcgtttttaggtgaaaatgtttttagagcggatctgacagaattgccggaggtggacaaccttcatgatcctgacggtgtcattagagaagctcaagaactggcagcagcagcgtatggcgccgatagatcatggtttttagtgaatggtagcacatgcggggtcgaaacgttggttatggcagtgtgtgatcctggcgacaaaattttattgccacggaactgtcataagtctgcaattgcgggtgtcatcttatccggggcggttccggtgtacatcgaacctgattttgatctggaactgggcattgcacatggaatcaccccggcgggattggaaagagcactggccgagcaccctgatgctaaaggtgtacttgttgtgtcaccgacatattacggggtttgctgtgatctggaagcactggcagcgattgcacatgcacatggcttaccactcctggttgatgaagctcatggtccgcatctggggtttcatccggaactgcctcttagcgcactggaagctggagccgatttggtcgtacaatccacacataaagttatttcaggcatgacgcaagcatcaatgttacatctgaaaggatcacgcattgatcctaatagagtccgcaacatcctgcaacttttacagtcaacaagcccgaattatgtactgatgatgagccttgatgttgctcgtcggcaaatggccctggaaggcgaggtgttgctcggacaaacattaacactggctgaccaggcacgtgcgcggcttaaccgcattccgggcatcttttgcttcggaccggaacggattggctcaacaccgggctttttcgatctggatcgaactaggttgaccgtcacagtttcaggccttggattatttggcttcgatgcccatgactgggtaaatgatcattttcacgttcaaccggaaatgtcaacactccacaacgttgtttttattatctctttgggcaacacgcagcgtgatattgaccggctggtcgaaagcgtagctgccctttctgagcaagcacagggctcacaaccttcattggctctcgccgaaaaacttagaagactggcgcagttgaaaagaccgccgctgccgccgcaaagactttcaccgagacaagcatttttcgcgccaattgaacgtatcccgtttcaagaagcagtcggccatatttgtgccgaaattatcagcccgtatccgccgggcattccgatcctggttccgggcgaagaagttacgcaagaagcagtcgattacctgcttttagtgcatgaagcaggcggctttattaacggaccggaagacgtcagactccagaccctgaaagtcgtaaagact

SEQ ID NO: 397 - DNA, 1440 bp, Anoxybacillus flavithermus
atggatcagcaacgtaccccattgtacactgccttgaagcgacacgacagcatccatccattctcctttcacgtgccaggccataaatacggcattgtgttcccaaaggaagctaaagatgactataagcagttgctgaaactggatgcgaccgagttgtccggcctggatgaccttcaccatcctgaatccgtgatcgccgaggctcagtccttggcagccaagttgtacaacgtcgaagcaaccttctttctggtcaacggctccaccgttggaaacttggcgatgatcttcgcagtctgcggagaaaagaagaaggtcatcgtccagcgtaattgtcacaagtccattatgcatgcattgcagttggtgggcgcgacccctgtcttcttgccacctgaatttgatgaggacgttcgtgtggcctcctacgtggcttatgaaaccatcaaaaaggcaattgagctgcaccaggatgctgcggcactggtcctgaccaacccgaattactatggcatggcagttgacttgaccgaagtggtcaacatcgcccaccgttaccgtatcccagtcctggttgatgaggcacacggcgcacacttcgtgttgggtgacccatttcctaagaccgcgatcacttgcggcgcagatgttgtggtccagtccgcacacaagaccctgccggccatgactatgggctcctacctgcacgttaactcctctcttatcgataaggaaaagttgaagtacttcttgcaggtgtttcagtcctcctccccgtcgtatcccattatggcatccttggatttggctcgttcttacttggcgcgcttgaccagaaaggacatcgaggacattttcaagcagatccagcaactgaaagatgctcttgacgaaatcgagggcattgcggttgtgcactcccaacatcccttcgtgaagaccgatttgttgaaaatcaccattcagactcgttcccaactgtctggttatgaattgcagcaacgattggaacaggaaggcatcttcgccgagttggcagatccattcaacgtgttgctggtctacccattggcagtcgttgaacgcttggaagaggttattaaaaaggtgaagagagccttccacggcctgtcgtattccgaagaattgctccattcctttcgtgcattctccttctccgcctcctctgccgctatctcttacaaggaactgcagacccttccaaagaaggtcatcgatttggaaaaagctgagggtttcatcgcggcagaaaccattaccccatacccaccaggcgtgccattgctgttcatcggcgagcgtatctcccgtgaacacatcgagcagattaagcgcctgaaatcctatcacgcgagattccagggcggcaagtttttgtcctccgaccaaatcgaagtgtactcaacctctaagaag

SEQ ID NO: 398 - DNA, 2763 bp, Candidatus Accumulibacter sp.
atgaaggcggactccaagtccaagaagtccttgggcgaatactattcagcattgcagttgagaaccgatcgttggtcggctctgaagatcgcgtccgagcagcttattcagtcctcctccgaccgcaagagaaacgaagcagagcgtaaagtggtcgaacttatcgatgcattgcgtccaattgagctgtactgggcctttcctggccatgacactttcggccgtttgggtgaattggtgacccaaggtcgtttcgatgtgttggctatcaccgtccgaaacatttgccactccttgctgtccaactcctaccgtcgaaacccacaccatcacgatgtggaagaattgaccgaaggctctcccgatgacgaatccaccgagcacgcagtcaaggatttgttgtatttcgaggttttgtttgtggattccttctccccgatgcaggaagagaacttgcgtcgtaagttcgcatctttgcgtcgagccgaagacccctttgtgtacgagccagtgttcgtcccatccttgaccgatgccctgattggtgtcatgttcaaccacaatgttcaggctgttgtgatcagaaacgatttgaagcgtgactccgaacaaacccttgagttgctgcatcgacacttgtctcgcctggaaaaaggtgtgctggaagaggtcgaaccaaaggagtacggcccagaattgtgcagaatgattgcaaaacttcgtccagaattggatgtgtatttgtttaccgaccagtccgtcgaagagatcgctggagcgaagctgggcaactgccgtcgtgttttctacaatcaagaagatcacttggatttgcacttgaacattctgcgaggcgtggctgaacgctttgaggcgccattctttaatgcattgactcagtatgcccgaatcccgaccggcgtgttccatgcgatgccaatctcccgtggcaagtccattaccgcatctcactggatcaaggatatgggtgacttttacggaatgaacattttcctggcagaaacctctgccacctctggcggcttggattccttgttggaaccgcacggccccatcaagaaagcacaggagatggcagcccgtgccttcggctccaaacaaaccttcttcgccaccaacggcacctctacctgcaacaagatcgtcgttcaggctattgtccgtccaggcgacatcgttctggtggatagagactgtcataagtcccatcactacggcatggttttggcaggtgcccaagtggtctacctggattcatatccacttaacgacttctcgatgtatggtgccgtgcctatgaaggaaatcaaacaccgtttgttggaattgaaggctgcgggcaaattggaccgtgtccgaatgcttctcttgactaactgcaccttcgatggtgttgtgtacaatgtcgaacgtgttatggaagagtgtttggcaatcaaaccggatcttgtgttcttgtgggacgaggcttggttcgcttttgcgcgtttcggcccagcgtaccgcaagagaaccgctatgtattgcgcgggtgtgctgcgtgaacgataccgctccgcggaatatcgtgaggcatacgccaagtatcaggagaaaatggctgacgcggatgacgcaaccctgcttaccactcgcttgatgccagatcctgaaaaggtgtccgtgcgtgcatacgcctgccagtccacccacaagaccttgacctctttgcgtcaaggctccatgatccatgttcacgatcaggactttaaggacgaagtggagcaagcattccatgaggcctacatgacccacacctctacctctccaaactatcagatcattgcatccttggacatcggccgtcgtcaggtggaactggagggtttcgaatttgttcagcgacaagtggagcaggctatgagccttcgcaaagtcattaacacccacccattgatctccaagtacttccacgtcgttaccgttgctgaaatgattccagcggagtaccgtaagtccggcatcaaatcatattgggaccctcaacacggttggtccgatattatggcagcctggtctgaagatgagtttgtgctggacgctactcgtatcaccttgtccgtggctggctccggatgggatggcgacaccttcaagaacgaaatcctgatgaacaagcacggtatccagattaacaagacctctcgaaataccgttttgttcatgaccaacatcggcaccactcgttcctccgtggcatacctgattgaagtgcttgtcaaaatcgcacgtgatttggatgagcgtttggatgacgcttccaatgtcgaacgaaagatcttcgagcgcaaggttaaagcactgcgtgaagatttgccaccattgccagacttctcctgctttcacgattctttccgtatttcctctggtaacggcaccccagagggcgacatccgttccgctttctttttggcgtacgatgaatctaagtgtgagtatatcccgattgaaggcaactccatcgagaaggctattgcgtctggccgtcagttggtgtccaccacttttgtgatcccttacccgcccggtttcccgattttggtgccaggccaggttatctctcaagaaatcattacctttatgcgtgcgctggatgttaaggaaatccacggctaccgtccagagttgggcctgcgcatcttcaccgaacaggcattggccgtcctggaggcctccccatcctccatccaagaattgcccacc

SEQ ID NO: 399 - DNA, 1470 bp, Geobacillus kaustophilus
atgtctcagttggaaacccctctgttcaccggcttgcttgagcacatgaagaaaaacccagtgcagttccacatcccaggtcacaaaaaaggcgctggcatggaccccgaatttcgcgccttcattggtgacaacgcgctggcgattgatctgatcaacatctccccgctggatgatcttcaccacccaaaaggcatgatcaaacgtgcacaggagttggcagcagaagcattcggtgccgattataccttcttctccgtgcagggcacctctggtgcaatcatgaccatggtcatgtccgtcgcaggtccaggtgacaaaattattgtgccccgaaacgtgcacaaatccgtgatgtccgcgatcgtgttctccggcgcaaccccaatttttatccacccagaaattgacaaagagctgggtatctctcacggcatcacccctcaggccgtggagaaagccctgcgtcagcaccccgatgcgaagggtgtgttggtcattaaccccacctattttggtatcgctggcgacctgaaaaagattgtggacattgcccactcttacaacgttcccgtcctggtggacgaggcgcacggtgtgcacattcactttcacgaggatctgcccctgtccgcaatgcaagcaggtgcagacatggcagccacctctgtgcacaagttgggtggttctctgacccagtcttctatcctgaacgttcgtgaaggtctggtctctgcaaagcacgtgcaagcaatcttgtctatgttgaccaccacctctacctcttatctgcttcttgcatccctggatgtcgcacgtaaacaactggcgaccaaaggtcgtgagcttatcgataaggccatccgtcttgcagattggacccgacgtcaaattaacgagattccctatttgtactgcgtgggcgaagagattctgggcaccgaagcgacctatgactatgaccccaccaagctgattatctccgtgaaggagctgggcctgaccggccacgatgtcgagcgttggctgcgcgaaacctacaacatcgaggtggagctgtccgacctttacaacatcctgtgtattatcaccccaggcgacaccgaacgtgaagcatcccttctggttgaagcactgcgtcgattgtccaagcagttttcccaccaggcagaaaaaggtatcaagccaaaggttctgctgccggacatccccgcactggcactgaccccgcgcgatgcgttctatgcagagaccgaggtggtgccttttcacgagtccgcaggccgtatcatcgcagagtttgttatggtgtatcccccaggcatccccattttcatcccaggcgagatcatcaccgaagagaaccttaagtatattgaaaccaacttggccgcaggtctgcccgtgcaaggtccagaagacgacaccctgcaaaccctgcgagttatcaaagaatacaaacccatccgt

SEQ ID NO: 400 - DNA, 2301 bp, Methanoculleus marisnigri
atggattacttggaagagttcccggttttggtcatcgatgacgaacttcactccgacaccgctgagggccgtgcatcccgagaaatcgttattgagctgaagcacgaagatttccccgtgatcgaagccctgaccgctcgtgacggcatccacgcctttctttcccacccacacgcttcttgcatcgtgattgattgggagttgtctcccgaaactgccgatggcaccctcactgcagccgacgtcatcaccttgattcgtgaacgaaacccaaaggttcctattttccttaataccgagaagttggcgatctccgcaattccgttgtccgtgatctcccgtattgatggctacatctggaagttggaagacaccccaggcttcatcgccggacacattaaacgtgctgcggcaaactatcttgctgatgtgttgccaccattcttccgaggcatgatggactacgtcgaagagtacaagtattcctggcacaccccaggtcacatgggcggcgtggcattcttgaagaacgccgctggccgcatcttttacaacttctttggtgaaaatgccttgcgtgctgatctgtccgcttctgttccagaattgggctccttgttggaacactcaggtgccgtgggagaagctgagcgtaaggcggcagaggtcttcggtgcagaccgaacctactttgttaccggcggcacctctgccgctaacaagatcgtctggttgtccaccgttacctctggcgatgtggtcctggtggaccgcaattgtcacaaatccgtcatgcatgcgatcattatgaccggtgcagtgccaatctacctgattccttcccgtaacgaatatggcatcattggtccaatcatgtcccgtgagttccgtcctgaagtgattgcggagaaagtccgaaactgcccgttgatcgaagaaccagcatcccgtaccgtccgaatggcggcaatcaccaactccacctacgatggcatctgctacagcaccgaacgtattgaagaacacttgcgtgatcgtgtgccatacttgcactatgacgaggcctggttcggctacgctcgttttcaccctctgtatgcgggccgtttcggcatgcatccaaccgatgaagtgggtcctactgtcttcgcaacccagtccacccacaaggtgctcgccgctttttctcagggctccatgttgcacgtccgccaagatcgtggcccagttgaccacccacgtttcaacgaagcgtttatgatgctgacctctacctctccacagtacaccatcattgcatccttggatgtcgcggcacgcatgatggcaggtcactccggccgtttcttggtggaagaggcgatcgaagaggcaattgtctttcgtaagaaaatggtcaccgttgctgaagagattcgtgccggctcccgagctggtgaagattactggtggttcactgtgtggcagccagattgcatcatggacgaagagaccgaacgccctttgggagaggctgatgcagcattgttgagagagcacgctggttgttggttgctgaacccgcacgatacctggcatggcttccccggtatcgaagagggctacgcaatgctggacccaatcaaggttaccattcttaccccaggcattggcccaggcggccgtatggaagaacgtggcatccctgcggcagttgtgaccaagtacttgcgtaagtccggaattgtcgttgaaaagaccggctactattccttcttggtcctgtttaccttgggcatcactaagggcaagtccggcacccttctcgcggaattgttccagttcaaggcattgtatgatcgtaactccccattggaagaagtgttcccagacttggtgcgcgaacacccagcacgttactccggccgtggcttggctgatttgtgccgcgagatgcatggctacttgcgtgatggctccatcgctggcaccctgcgtaacgtttatgcaactcttccagaacctgtgatgacccctgcggaggcataccgtcacttggtgcgtggcgaagtggctccggtgcccgcaggtgaaatcgagggacgtaccgtggccgtcatggtggtcccatatccgcccggtatcccggtcattatgccaggcgaacgttgcggtgctgctacccgagccatcgttgattacttggtgtccttgcaggagttcgacgctttgttcccaggttttgaatccgaagtgcacggcgttgatgttgtggtcgcagaagacggccaacgtgtgtactatgtctactgtgttaccgag

SEQ ID NO: 401 - DNA, 1782 bp, Chlamydomonas reinhardtii
atgcaagaaccggatcgactgcctggaattgagtctgctcatagaggcggcggcacaccgccgcattttgccagcttaatgacagcaggcggctcaggcaatggagacggaggtttgacgccagcattttcaccgctgcaatatgatctgacagaaattgctggattagactacttgtcaagcccgtcaggcgtgatcgccgaggcacaacagttagcagcgcaggcgtttggcgctgatcgaacatggttcctggtcaacgggtgctcagcaggcatccatgctgccgtcatggctgtagcaggaccgggcgctggccgggcaagacgccgtcggcaacaggtgcaacaccctcaggatatggacaatacatctggctcagcggatggtcaaacaacaacatctgatgcaggcggccagggagctgaaccagcttctgagaaaccgggagttctgcttgtggccagaaactgccatctgtcagtctttagcgcattagtattgagcggacttgaaccggtttggctggcgcctgaactagatccgagagccggagtcgcacattgtgtaacaccgggcacagttgcagcggctctggctggtgccgcagcggctggcagaagagtcgctggagtaatggttgtgtctccgacatattttggagccgttgcagatgtgcggggtattgcccaggtctgcgcaggctacgatgttccgttattggtggacgaagctcatggaggtcactttgcatttctgccgccggcatcactgccgccgccgccgccgtcagccctttcctgtggcgcagatatggtcatgcaatctacgcataaggtattaggagcaatgacccaggccgcaatgctccatctgcgtggcgaacgggtttcagcggctcgaacatcaagagcactgcaaacactgcaatcatcatcaccgagttatctgctgatggcttcacttgatgctgcaagacaacaggcagcagcaggcggcgcatttgctgaaccgtgcgcagcggctcaagttatcagagaggcagtttcaagatgttcgttagtccagcttttagacaatcaaacagcgcagggtgcttcaaattcaggctcatcaacagaagttggcggctcatcacatgcgggcacatcatcatcaacactgcatggccatccgggctcatcatgcaatgcggaaagcattgcatttttcgatcctcttcgtttaacattgctcgttgatagaattgctgcagttccggcggctgccgcagacggatcttccaactctgttagacgctgttccggctcatcaggttttgccgtgagcgaatggctggaagcacgtcatggcgtcgtaccggaattggccactgcaaaaacagttgtgttagcactgggaccgggctcaacactggctcacgctagacaagcagttgcggctattctggaacttgatagattagccgcagcggctccgcaagactgggcaggcggcggcgttcaggctgaaccgcctcatgcaccgctggcaccagatatggtgttgtcacctcgtgacgcgtattttgctgaaacagagtcagttccggctgcagaagcagtgggacgggcctctgcagaactgctttgtccgtatccgccgggcgttccggttctgtttccgggcgaacgcatcacgcctgcggctcttgctgcattacaggcaaccttagctgcaggcggcacagtcacaggagcatctgattcaagcctgatgcgttttgaagtacttgtcgtagac

SEQ ID NO: 402 - DNA, 1383 bp, Alkalibacter saccharofermentans
atgaaatcccgtttatatttgaacatcgaatcaaagcgcaaaaatgcaaactttcacatgccgggtcataaaagcagagattttaccaaactggggtgggaatacttcgatacaacggaactggaaggcacagacaacctgaataaccctcaaaaagaaattcgagaaatcgagaggcagatttcaaaaagctatgcgagcaaggaatgcattatctctgtgaatggctcaacatcactgattatggctggcatcatgggatcttgccgagaaggagattgtgtcgcggtagctagaaattcacataaaagcgtcttttctgcgatctattacggcagactgaaaacactgtttattgatccggtgttggaccctatctatggttaccctgtcgggatcgatcttaaacatctggaagcggaactgcgtaagacaagagttagagcactggttatgacctatccaacttattacggaacgtgcgatgacttaaatgctgtcaaacatatttgcgatagccatgacgtcctgcttatcgtagatgaagcacatggcgcacattttaaacattcaatggaatttccgccgtcatcaattgatattggagccgacattaccatccacagcactcataaaattctgtcatcactgaatcaaggcgcagttctgcacgtgaaatcagatcgggtagacatggaaaacatcagaagacacatggcgatgttgcagacatcatcaccttcctatccaattatcctgagtgttgaagaagcagtgaaattcatgaatgaaaacggcgaaaagaaactggagaaaattcaaggattctacgagagagttaagaaagcactggaaggaacaaaattcacactcatccatgataaaatttcaagagaaattctccaggtagataaagcgaagatttggcttgctccgggcggagttggtaaaatcctcgccgaggattacaacatcgacatcgaactggatgacggcaaaacagcactttgcatgatgggtgtcggcacagttattgaagatgttgaccgtctgatcacggcgcttaaagatatttcagagaaaggcctgtttaaagattccttggaagacagtaaaagagcactgtttccgaaagcaggaaacaaagttatggaagcctgggagatcgatagaatgaagaaaagaatggtttcaattaagaaagcagcgggcaaagtttcagcatcgtatcttgtaccttatccgccgggcgttccggttgtgtgtccgggcgaaatggtatctgatgctgccgcagactatctgtactcgatgaaagaaggctcagttgatggaatgattgaagacaagatgatctatatccttgatgaagaacaaacatta

SEQ ID NO: 403 - DNA, 1782 bp, Chlamydomonas reinhardtii
atgcaggaacccgatcgtttgccaggcatcgagtccgcacaccgtggcggcggcaccccaccacacttcgcgtctttgatgaccgcaggcggctccggaaacggcgacggcggcttgacccctgccttttccccgttgcagtacgatctgaccgaaatcgctggtcttgactacttgtcctccccatccggcgtcattgcggaggcacagcaattggcagcccaagccttcggcgctgatcgaacctggtttctggttaacggttgctccgcaggcatccacgctgcggtcatggcagttgcaggcccaggcgctggccgtgcacgtcgtcgtcgtcagcaagtgcagcacccacaggatatggacaacacctctggctctgccgatggtcagaccactacctctgatgcaggcggccaaggtgctgaacctgcttccgagaagccaggcgtgttgctggtcgcgcgtaattgccacttgtccgtgttctccgcattggttctgtctggccttgaaccagtgtggcttgcacccgaattagatccacgtgctggcgtggcacactgcgtcaccccaggcaccgtggcagccgctttggctggagcggcagccgctggccgtcgagttgctggtgtgatggtggtctccccgacctactttggcgcggtcgcagacgttcgtggtatcgcgcaggtgtgcgcaggctatgatgttcctttgttggtggatgaagctcacggcggtcatttcgcctttttgccgcccgcatccttgccaccaccaccaccatctgcgttgagctgtggcgcagatatggtcatgcagtccacccacaaagtcctgggtgcaatgacccaagcggcaatgcttcacttgcgtggcgaacgagtgtccgctgctagaaccagccgcgcattgcagaccctgcagtcctcctccccatcgtacttgctgatggcttccttggatgctgcacgtcagcaagcagcagcaggcggcgcattcgctgaaccatgcgcagccgctcaggtcatccgtgaggcagtgtcccgttgttcgctggttcaattgttggataaccagaccgcccaaggagcttccaactccggctcctccaccgaagtgggcggctcctcccacgcaggcacctcttcttccaccctgcacggccacccaggctcctcctgcaacgccgagtccatcgctttctttgatccattgcgcctgaccttgctggttgacagaattgctgcagtgcctgccgctgcggcagatggctcctccaactccgtgcgtcgttgctccggctcctccggattcgcggtgtccgaatggcttgaggcacgtcacggcgttgtgccggaattggcgactgcaaagaccgtcgttcttgcgttgggtccaggctccaccctggcacatgctagacaggcagtggcagctatcttggaactggatagactggcggcagccgctccacaggactgggcaggcggcggcgtgcaagcagagcctccgcacgcgcctcttgcaccagatatggtcctctcccctcgcgacgcctacttcgctgaaaccgagtctgtcccggctgcagaagcagttggccgtgcgagcgcagagcttctctgcccatatcccccaggtgttcctgtgttgtttccgggcgaacgtattaccccagccgctcttgcggcattgcaggcgaccttggctgcaggcggcaccgtcaccggagcatccgattcctccttgatgcgtttcgaggttctggtggtggac

SEQ ID NO: 404 - DNA, 1326 bp, Carboxydothermus pertinax
atggctgaactgattaacaaactgaagatccatcttaataagaaaccggtttcatttcacatgccgggtcacaaaaatgggagatttctgccgaagaaagtgaaaaacctgcttggcgaaaaatatttttctgctgatgtcacagaactgccgggcctggataatctgtttacaccagaaggagttttattgaatctggaagccaaaattgcacgatattttggcttcccgagagcacatctgagtgtaaatggctcaacagcagcggttctggcgcttatgctgtcatttttcaaaccgggagaaaaggttgtggtcgatagaatgtctcatatttccctgtatcatggcatggtacttggcgatctgctgccagagtttatctatccggactgggatgacgagtacggcttacctgttaacaaaaacccaaatacaaacgccaaagcatattttctgacgaaccctgattatcatggcctggttagagacttgtctgaactgaaaacagctaagatttttctggatgctgcacatggcggcctgatcccgctttggcgcaaggatttctttcagaacatcgacggtttcgccgtgtccttacataaaacaggcccgttcccaaaccctctggcagctgtagtttattgggatgaaaaagtggaggtcaagcgtgcattgaatctggtgcaaacaacgtcaccaagctacccgcttatggctgccgcagaaggcggcgttgatatgcttttacaatctggcagacgcgccatgcagaaagcagtagaagttgcgcaactgtttaaagaatcactgaagaaaagaggcatcggctttctgcaggctaaatatagcgccgaaccgttaaaagtgacattgaaggcacaagatcttggcatgtcaggagagaaaattgcgaacgtactcatgaagaaaggcatctttccggaagcgtatggaccgggctacgttctgtttatgttgtctccgggaaataccgaaaacgaggttaagaaactgctcaaagtcattgattccttaaaaggtacaaagcagagaatcatgttgcctaaaaacccatttcaaggacagagcaaactgaaactgacaccgcgcgaagcgtattacgctaaagaaaagtgggtggaactgcaagatgcggctggcaaaattgctcgtgacggagtgacactgtatccgcctggtgccccggtcctttatccgggcgaagagattacgcgggaagcggtcgcttatatcaattaccatctgaaattgggactcaccgtaactggtatcaaagatgggcgtattcgggttatccgc

SEQ ID NO: 405 - DNA, 1452 bp, Thermoactinomyces sp.
atggaaaatcaagagaaaacaccgatctatgaagctctgcttcatcacaaggataagaaaacagacagctaccatgttcctggtcacaaacaaggggccaattttcttgatcataaggacaacttattccagagcattttgcaaatcgatcagaccgaagtcactggcctggatgacttgcatcacccgtctggtgtaattgctcgtgccgaatatcttgcagcggaagcatttggagcggagaaaacattctacttagtgggcggaagcacggctggaaacattgcctctatccttacaatgtgcttacctggcgataaagtcatcctgcaacggagctgccatcagtctgtctttcatggctgtatgcttgcgggcgtttcaccaatctattggaaagatgcttaccattctgacacgggatttgaaagaccgctggatctggattggcttgtccagaaatgccggcatgaaatggtaaaactggttgtgatgacatcccctagttattacggcatggttcaaccaatcagaaagatcgcagatatttgtcatcagtttgacgtccctttattggtagatgaagcacatggcgcacattttggattccatccaaatctgccgaatagcgcattgtcacaaggcgcggatctggtcgtacaatcaacacataaaatgttgggctcaatgactatgtcaagcatgttacacgttggctcatcaagagttagaattaatgatttggaaagacaactccgcattgtgcaatcatcatcaccttcgtatccactcctggcatcactggatctggcccgaaaacaagttgcagtgaacggctaccatctttttggacgtcttctcacagagatcgatcagtttaagaaagacacgttcccttattgcaaatgggttcaagaacttagcttacatcatctgaaatgccaagatccgtgtaagatggttattgccagctctggtcaaatgacagggtttgagatgcaagcatttctggaagataaaggaatctatacggaacttgcggatgacagacgcgtcctgttttgtttctcccttggccatccggagggctcactgatccggctgaagaaagtactgctggaactggattgctggcttgacagctgtgagaatcgtttatccgaacgggacagtattgttttgagactcccgtcaacaacggaatttgtgctgcctttccaagatattagaaaacatcagcacgttcgcctgtgcctggaagatgcgattgacggcattatcaccgaaccgatcgttccttatccgccgggcattccggtgctgcttccgggtgaaagactgacatgtgaatggatggagtatcttagaggcgcagacagggcgggctatagaattagaggcttataccaagatcagttgacgtcagaagtccgcgtaaacattgtttttgtg

SEQ ID NO: 406 - DNA, 1452 bp, Thermoactinomyces sp.
atggaaaaccaggagaagaccccgatctacgaggctttgctgcaccataaagataagaagaccgactcctatcacgtgccaggccataagcagggcgcgaacttcctggatcacaaagacaacttgttccaatccatcctgcagattgaccaaaccgaagtcactggtcttgatgatttgcaccatccgtccggcgtgatcgctcgtgcggaatacctggcagccgaggcattcggcgccgaaaagaccttttatttggtgggcggctccaccgctggtaatatcgcgtccattcttaccatgtgcttgccaggcgataaagttattctgcagcgttcatgccaccagtccgtgttccacggctgtatgttggcaggcgtgtccccgatctactggaaggatgcttatcacagcgacaccggttttgagcgccccttggatctggactggctggttcagaagtgccgtcacgaaatggtgaaattggtggtcatgacctctccgtcctactatggcatggtgcagcccatccgtaaaattgcagacatctgccaccaattcgacgtcccattgttggtggatgaggcacacggcgcacacttcggatttcacccgaacttgccaaactccgcactcagccagggcgccgatttggttgtgcaatctacccacaagatgctgggctccatgactatgtcctctatgcttcatgtgggctcctcccgtgtgcgtatcaacgacttggaacgccagctgagaatcgtccagtcctcctccccaagctaccctttgctggcatccttggatttggcgcgaaagcaggtcgcagttaatggctatcacctgttcggtcgccttctcaccgagatcgatcagttcaagaaagacacttttccatactgcaaatgggtgcaggaattgtccctgcaccacttgaagtgccaagacccttgtaaaatggtcattgcatcctccggccagatgaccggtttcgagatgcaagcatttctggaagataagggtatctacaccgaattggccgatgaccgtcgagttttgttctgcttttcactgggacacccagagggctccttgattcgtctgaagaaagtgttgctggaacttgattgctggctcgactcctgtgagaaccgtctgtccgaacgagactctatcgttcttcgactcccatctaccactgagttcgtgttgccttttcaggatattcgtaagcaccaacatgtgcgattgtgcctggaggatgccatcgacggcatcattaccgaaccgattgtcccctacccaccaggcatcccagttcttttgccaggcgagcgtctgacctgtgaatggatggagtacttgcgtggcgcagacagagccggctaccgtattcgaggtctttatcaggatcaactcacctctgaagtgcgagtcaacatcgttttcgtg

SEQ ID NO: 407 - DNA, 2199 bp, Vibrio cholerae
atggcactggtgttgctgaccgtccagtgcactgaatccgccttctttcgcctcggcgatgtgcaaatgaacattttcgctatccttaatcacatgggcgttttctttaaggaagaaccagtgcgtcagctgcatgcagcccttgaaaaagcgggttacgatgtggtctatccggtcgatgacaaagaccttattaagatgatcgagatgaacccacgtatctgcggcgttttgttcgattgggacaagtactccttggaattgtgtgagcgaatttccaaagtgaacgaaaagttgccagtccacgcgttcgcaaatgagcagtccaccttggacatctccttgactgaccttcgtctcaacgtgcacttctttgaatacgcgctgggcatggcagatgacatcgcaatcaagatcaaccaggctacccaagagtacaaggatgcgatcatgccacctttcaccaaggcattgttcaagtacgtcgaagagggcaagtataccttctgcaccccaggccacatgggcggcaccgcttttcagaagtccccagttggctccatcttctacgatttttatggccctaacaccttcaaggcggacgtgtccatctccatgccggaactgggctccttgttggatcactccggcccacataaagaggcagaagagtacattgcccgaaccttcaacgccgacgcttcctatatcgtgactaacggcacctctacctctaacaagattgtcggaatgttttccgctccagcaggctctaccgtcctggttgatcgtaactgtcacaaatccttgacccacttgatgatgatgaccgacgtgaccccaatctacttccgccccaccagaaacgcatacggcatcttgggcggcatcccacagaatgagttttcccgtgaagtcatcgctgagaaggttgcgaacaccccaggtgcctcagctccttcctacgcagtgatcaccaactctacctacgatggcttgctgtacaacacccaattcattaaggaatccttggattgcaagcacatccatttcgactcggcatgggtgccgtacaccaactttaatcgtatctatgagggcaagtgtggaatgagcggcgaggccatgcccggcaaggtgttctacgaaacccagtccacccacaaacttctcgctgcgttctcccaggcatccatgatccatgtcaagggtgaatttgatcgtgagtccttcaacgaagcattcatgatgcacacctctacctctccacagtacggcatcgttgcctctaccgaaactgcagccgctatgatgcgtggtaacaccggacgaaagctgatgcaagatagcattgaccgcgcgatccgtttccgaaaggaaatcaaaagattgaagggcgaatctgagggttggttctttgacgtctggcagccagaaaacatcgagaccactgaatgctggaagttggacccaaatcaagactggcacggcttcaaaaacttggatgacaatcacatgtacttggacccaatcaagatcaccttgctgaccccaggcatgtctaaagacggcgaattggagcagagcggtatcccagcatccttggtgtccaagtaccttgatgagcacggtattgttgtggaaaagaccggcccatataacttgttgttcttgttctccattggcatcgacaagtcaaaagcgatgcaattgctgcgcggcttgaccgagttcaagcgtggctacgatttgaacctgaccatccgtactatgcttccatccttgtaccgagaggaccctgtcttttatgagggtatgcgtattcaggagctggcccaaggcatccacgatcttacccgaaaataccagttgccggaactgatgtataaggctttcgacgttctgccggagatgaaagttaccccacacgtggcgtggcagcaagaattgcgcggtcaaaccgaagagatccttctcaacgagatggttggccgtgtgtccgcaaatatgattctgccttacccaccaggcgtgccacttgttttgccaggcgaaatggtcaccgattcctctcgcccagtgttggatttcttggaaatgttgtgtgaaatcggtgcccactacccaggctttgagaccgacatccacggcttgtaccgtcagaaggacggctcctataccgtgaaagtcctgaaggat

SEQ ID NO: 408 - DNA, 2256 bp, Taylorella equigenitalis
atgaagttccgttttccaattgtcatcattgacgaagactttcgtagcgattcggcatccggattcggaatccgcgctctggccgatgcaattgaagaggaaggttgggaggtgcttcccgccacaagctatggtgaccttacctcattcgttcaacagcagtcaagagctagcgcgtttatcctctccattgacgacgaggaatttgaatccgattcacctcaggatgtggcagaggcaatccgcaaccttcgctctttcattaacgagctcaggtttaggaacgaggatatccccatttacctgcatggtgagacaaggacctcggaacacatccccaatgacatcctgaaagagctccatggcttcattcacatgtttgaagacaccccggaatttgttgcgagacacatcatccacgaagctaaatcatacttggacacgcttgcgccacctttcttccgcgaacttgtttcgtatgcccatgacggctcctactcctggcattgcccaggccattctggcggtgtggctttcctcaagtcgcctgtgggccagatgttccatcaatttttcggagaaaatatgcttcgtgctgatgtgtgcaatgcagtcgaagagctcggacaacttttggatcataccggccccgttgcgaagtcagagattaatgccgcacgaatcttccacgcagaccactgttactttgttacaaatggtacgtcaacgtcgaacaaaattgtgtggcacggcaatgttgcagaggatgacattgttgtggtggacaggaattgccacaaatctattttgcatgcaatcacaatgacgggagctattcctgttttcttgcgtcccactagaaatcaccttggaatcatcggccccattccactctctgaattcgaacctgagaatatcaagaagaaaatcgaggataatccgttcattagcgacgagcttaagaagaaacctcgaatcttgactttgacacaaggtacttacgatggaatcctttacaacgtcgagatgatcaaggaaaagctcggtgataccatggagaaccttcattttgatgaagcatggctcccacatgcagcatttcatgagttctatacaaacatgcatgctatcggcgccaataggccacgttcgaaagaggctattatctatgcaacccactctactcacaaaatgcttgctggtattagccaagcgtcgcagatcatcgttcaagactcggaaagcaggaagttggatcgtaatatcttcaacgaatctttcctgatgcatacgagcacttctccgcagtacgcgatcatcgcatcttgcgatgtggcggcagcaatgatggaacctccaggtggaacagccttggttgaggaaagcatccgagaatcaatggactttcgccgtgcgatgcgaaaagttgcgtcagagtttggcaaggacgactggtggtttaaggtctggggtccaccaagactcgtgcaagaagacattggctggcaaggtgattggctcttggagcccgacgcggattggcacggttttgctaacatcactgaaggttttactatgttggaccctatcaaaaccacaattgtgactccaggcctggaaattgatggaactttcgaagaaagcggtattcccgcttcgcttgtctccaaatatttgaccgaacacggaattgttgttgaaaaaactggcctctactccttttttatcatgtttaccatcggcattacaaagggtaggtggaatacgcttttgacctcacttcagcaatttaaggacgattacgacaagaaccagcccctgtggcgttcaatgccggactttattaaacaatatcccatgtatgagtccttcggtttgcgagacctctgccaaaagcttcatgaggcctatcaccacagagatcttgctcgcatcactacggaagtttacgtgtctgaaattgagtctgcaatgcgaccgaaggacgcgtataataagatgacacgcagacaaatcgaacgagttgatatcaacgagttggaaggtagagttactgccgtcttgttgacgccgtacccccctggaattccattgcttatccccggtgaaaagtttaataagacaattgtgcaataccttaaatttgtctgtgagttcaacgtcgagttccccggatttgaaaccatggtgcacggcctcggtacagaaactttgccaaacggagagatccattactacgtcgattgcttgatcgac

SEQ ID NO: 409 - DNA, 1284 bp, Saccharomyces cerevisiae
atgaccgccgcgaaacccaacccatacgcagcgaagccaggagactacctttccaacgttaacaactttcagctcattgattccaccctgcgcgaaggagaacagttcgcgaatgcgtttttcgacaccgagaagaagatcgaaatcgctcgtgccttggatgacttcggcgtggattacattgaactgacttccccggtggcctcggagcagagccgcaaggactgcgaggcgatctgcaaactgggcctgaaagccaagatccttacccatattcgctgccatatggatgatgctaaggttgcggtagagaccggagtggacggagttgacgtcgtgatcggaacgtcgaagtttttgcgccagtactctcacggcaaggatatgaattatatcgcaaagagcgctgtggaggtaattgaatttgtgaagtcaaagggcattgaaattcgcttttcgtccgaagattccttccgcagcgaccttgtagaccttctgaatatctataagaccgtggacaaaatcggcgtgaatcgagttggtatcgccgatacagtgggttgtgctaatccccgccaagtctatgaactcatccgaacccttaagagcgtcgtaagctgcgatatcgagtgtcactttcacaacgatactggctgcgcaatcgctaacgcatataccgctctcgaaggcggcgctcgtctgattgacgtatcggtcttgggtatcggcgaacgaaacggtatcacaccgctgggcggccttatggcacgcatgattgttgcagcaccagactacgttaagtccaagtacaaacttcacaagatccgagacattgagaacctggtcgccgatgccgtcgaagtgaatatcccattcaataatcccattaccggcttctgtgcgttcacccataaggcgggcatccacgccaaagccattttggccaacccgagcacgtacgagatccttgatccacacgactttggtatgaagcgttacatccacttcgcgaatcgtctcaccggctggaacgcaatcaaggcccgcgtagatcagctcaacctcaaccttaccgatgatcaaatcaaagaagtcaccgccaaaatcaagaagctcggtgacgttcgctcgcttaacatcgatgacgttgattcaattatcaagaacttccatgcggaagtgtcaactccccaagtactctccgctaagaagaataagaagaatgactcagacgtgccagaacttgcgaccattcctgccgccaaacgtactaaaccatccgcg

SEQ ID NO: 410 - DNA, 1461 bp, Kibdelosporangium sp.
atggagcatactcgcgcgcctgtgttggaggcccttcgttcgtaccgtgatggagaacatctctctttcctgccaccgggtcacaagcagggccgcggtgcagatccacgtacgctggacgtcctgggcaaagacgtgttcgcgtctgacgttattttgatgaatggtctcgacgatcgcgctatgcgccaaggtgtcttggctgatgctgagaagcttatggcagatgcggtccgtgccgacactgcctttttctcgacgtgcggttcatctctttcagtcaaaacatgcatcattaccgttgctgcgcctcgccagccactgctggtgtcacgcaacgcacacaagtctgtcatcgcaggcgtaatcatctcaggcatccaacccgtgtgggtacacccacgatgggatgagcgtttggatcttgcgcacccaccagacaccgatgccgtggctgcggctttccgccgtgctccagatgcaaagggcatgctccttattacgccaacggactatggcacgtgtgcttccattagcgacatcgctaaggtctgccatcaatatgatcgccctttgattgtagatgaagcgtggggtgcccatttgccttttcaccccgacctcccatcatgggctatggacgcagacgcagatctctgcgtgacgtccgtgcacaagatgggtgcgggattggagcagggtagcgtgtatcaccttcagggtgaccgcgttgacccacgcctgctcaaagcccgtgcagaccttctcgacacaaccagccccagcgccttgatgtacgctgcccttgacggctggcgccgccagatggttgaacacggtcatggcctgctcgaccaggctctcggccacgcgcacaccttgcgtcaacgcttgggaggtcttgatggcattcgtgtgactggccgtgctgacctcgtgggccctggtcgtgcaaacgatgccgatccgctcaaagttattgttgacttgaccgatctgggtgtgtctggttacgtggcgaacgaatggcttcgtgatcaccaccacgtggatgttggtctgtctgatcaccgccgcttcgccgcacagatcaccgttgccgatgatgaaagcaccgttcaccgtctcgttaccgccgtccgcgatctcgtgaaacacgcgggccaactgcctcgcaccccaccagtcgacctccctgaaccaggcgaactggagctggaacaagcagttcgcccacgcgatgcgttctttggcgaagccgaacacgtggacgtggataaagccgtgggccgaattgctgcagagaccatttccccttacccacctggtgtcccagccgttgtccctggtgaagtgattacccagccagtgcttgattacctgcgctccggactgcgtgctggtatgtatatccctgatgcaggtgatccagatctggcaacaattcgtgtggccgctacc

What is claimed is:

1. An engineered microbial cell that expresses a non-native lysine decarboxylase, wherein the engineered microbial cell produces 1,5-diaminopentane.

2. The engineered microbial cell of claim 1, wherein the engineered microbial cell also expresses a non-native 1,5-diaminopentane transporter.

3. The engineered microbial cell of claim 1 or claim 2, wherein the engineered microbial cell expresses one or more additional enzyme(s) selected from an additional non-native lysine decarboxylase and/or an additional non-native 1,5-diaminopentane transporter.

4. The engineered microbial cell of claim 3, wherein the additional enzyme(s) are from a different organism than the corresponding enzyme in claim 1 or claim 2.

5. The engineered microbial cell of claim 3 or claim 4, wherein the additional enzyme(s) comprise(s) one or more additional copies of the corresponding enzyme in claim 1 or claim 2.

6. The engineered microbial cell of any of claims 1-5, wherein the engineered microbial cell comprises increased activity of one or more upstream lysine pathway enzyme(s), said increased activity being increased relative to a control cell.

7. The engineered microbial cell of any of claims 1-6, wherein the engineered microbial cell comprises increased activity of one or more enzyme(s) that increase the supply of the reduced form of nicotinamide adenine dinucleotide phosphate (NADPH), said increased activity being increased relative to a control cell.

8. The engineered microbial cell of claim 7, wherein the one or more enzyme(s) that increase the supply of the reduced form of NADPH is selected from the group consisting of pentose phosphate pathway enzymes, NADP+-dependent glyceraldehyde 3-phosphate dehydrogenase (GAPDH), and NADP+-dependent glutamate dehydrogenase.

9. The engineered microbial cell of any one of claims 1-8, wherein the engineered microbial cell comprises reduced activity of one or more enzyme(s) that consume one or more lysine pathway precursors, said reduced activity being reduced relative to a control cell.

10. The engineered microbial cell of any one of claims 1-9, wherein the engineered microbial cell comprises reduced activity of a native lysine exporter, said reduced activity being reduced relative to a control cell.

11. The engineered microbial cell of claim 10, wherein the native lysine exporter is Corynebacterium glutamicum lysE or an ortholog thereof.

12. The engineered microbial cell of any one of claims 1-11, wherein the engineered microbial cell comprises reduced expression of the C. glutamicum NCg10561 gene or an ortholog thereof, said reduced expression being reduced relative to a control cell.

13. The engineered microbial cell of any one of claims 1-12, wherein the engineered microbial cell comprises reduced expression of the C. glutamicum trpB gene or an ortholog thereof, said reduced expression being reduced relative to a control cell.

14. The engineered microbial cell of any one of claims 9-13, wherein the reduced activity is achieved by one or more means selected from the group consisting of gene deletion, gene disruption, altering regulation of a gene, and replacing a native promoter with a less active promoter.

15. An engineered microbial cell, wherein the engineered microbial cell comprises means for expressing a non-native lysine decarboxylase, and wherein the engineered microbial cell produces 1,5-diaminopentane.

16. The engineered microbial cell of claim 15, wherein the engineered microbial cell also comprises means for expressing a non-native 1,5-diaminopentane transporter.

17. The engineered microbial cell of claim 15 or claim 16, wherein the engineered microbial cell means for expressing one or more additional enzyme(s) selected from an additional non-native lysine decarboxylase and/or an additional non-native 1,5-diaminopentane transporter.

18. The engineered microbial cell of claim 17, wherein the additional enzyme(s) are from a different organism than the corresponding enzyme in claim 15 or claim 16.

19. The engineered microbial cell of any of claims 15-18 wherein the engineered microbial cell comprises means for increasing activity of one or more upstream lysine pathway enzyme(s), said activity being increased relative to a control cell.

20. The engineered microbial cell of any of claims 15-19, wherein the engineered microbial cell comprises means for increasing activity of one or more enzyme(s) that increase the NADPH supply, said activity being increased relative to a control cell.

21. The engineered microbial cell of claim 20, wherein the one or more enzyme(s) that increase the supply of the reduced form of nicotinamide adenine dinucleotide phosphate (NADPH) is selected from the group consisting of pentose phosphate pathway enzymes, NADP+-dependent glyceraldehyde 3-phosphate dehydrogenase (GAPDH), and NADP+-dependent glutamate dehydrogenase.

22. The engineered microbial cell of any one of claims 15-21, wherein the engineered microbial cell comprises means for reducing activity of one or more enzyme(s) that consume one or more lysine pathway precursors, said activity being reduced relative to a control cell.

23. The engineered microbial cell of any one of claims 15-22, wherein the engineered microbial cell comprises means for reducing activity of a native lysine exporter, said activity being reduced relative to a control cell.

24. The engineered microbial cell of claim 23, wherein the native lysine exporter is Corynebacterium glutamicum lysE or an ortholog thereof.

25. The engineered microbial cell of any one of claims 15-24, wherein the engineered microbial cell comprises means for reducing expression of the C. glutamicum NCg10561 gene or an ortholog thereof, said expression being reduced relative to a control cell.

26. The engineered microbial cell of any one of claims 15-25, wherein the engineered microbial cell comprises means for reducing expression of the C. glutamicum trpB gene or an ortholog thereof, said expression being reduced relative to a control cell.

27. The engineered microbial cell of any one of claims 1-26, wherein the engineered microbial cell is a bacterial cell.

28. The engineered microbial cell of claim 27, wherein the bacterial cell is a cell of the genus Corynebacteria.

29. The engineered microbial cell of claim 28, wherein the bacterial cell is a cell of the species glutamicum.

30. The engineered microbial cell of claim 29, wherein the non-native lysine decarboxylase comprises a lysine decarboxylase having at least 70% amino acid sequence identity with a lysine decarboxylase selected from the group consisting of Escherichia coli, Vibrio cholerae, Candidatus Burkholderia crenata, butyrate-producing bacterium, and any combination thereof.

31. The engineered microbial cell of claim 30, wherein the cell comprises at least three different lysine decarboxylases.

32. The engineered microbial cell of claim 31, wherein the engineered microbial cell comprises three non-native lysine decarboxylases having at least 70% amino acid sequence identity with each of the lysine decarboxylases from Escherichia coli, Candidatus Burkholderia crenata, and butyrate-producing bacterium.

33. The engineered microbial cell of claim 32, wherein the engineered microbial cell additionally comprises a non-native lysine decarboxylase having at least 70% amino acid sequence identity with a lysine decarboxylase from a mine drainage metagenome.

34. The engineered microbial cell of claim 33, wherein the lysine decarboxylases from Escherichia coli, Candidatus Burkholderia crenata, butyrate-producing bacterium, and the mine drainage metagenome comprise SEQ ID NOs:87, 97, 30, and 93.

35. The engineered microbial cell of claim 27, wherein the bacterial cell is a cell of the genus Bacillus.

36. The engineered microbial cell of claim 35, wherein the bacterial cell is a cell of the species subtilis.

37. The engineered microbial cell of claim 36, wherein the non-native lysine decarboxylase comprises a lysine decarboxylase having at least 70% amino acid sequence identity with a lysine decarboxylase selected from the group consisting of a Clostridium species, Staphylococcus aureus, and any combination thereof.

38. The engineered microbial cell of claim 37, wherein the cell comprises at least three different lysine decarboxylases.

39. The engineered microbial cell of claim 38, wherein the engineered microbial cell comprises three non-native lysine decarboxylases having at least 70% amino acid sequence identity with each of the lysine decarboxylases from Clostridium CAG:221, Clostridium CAG:288, and Staphylococcus aureus.

40. The engineered microbial cell of any one of claims 1-26, wherein the engineered microbial cell comprises a fungal cell.

41. The engineered microbial cell of claim 40, wherein the engineered microbial cell comprises a yeast cell.

42. The engineered microbial cell of claim 41, wherein the yeast cell is a cell of the genus Saccharomyces.

43. The engineered microbial cell of claim 42, wherein the yeast cell is a cell of the species cerevisiae.

44. The engineered microbial cell of any one of claims 1-43, wherein the non-native lysine decarboxylase comprises a lysine decarboxylase having at least 70% amino acid sequence identity with a lysine decarboxylase selected from the group consisting of Yersinia enterocolitica, Castellaniella detragans, Prochorococcus marinus, and any combination thereof.

45. The engineered microbial cell of claim 44, wherein the cell comprises at least three different lysine decarboxylases.

46. The engineered microbial cell of claim 45, wherein the engineered microbial cell comprises three non-native lysine decarboxylases having at least 70% amino acid sequence identity with each of the lysine decarboxylases from Yersinia enterocolitica, Castellaniella detragans, and Prochorococcus marinus.

47. The engineered microbial cell of any one of claims 1-46, wherein, when cultured, the engineered microbial cell produces 1,5-diaminopentane at a level at least 5 mg/L of culture medium.

48. The engineered microbial cell of claim 47, wherein, when cultured, the engineered microbial cell produces 1,5-diaminopentane at a level at least 5 gm/L of culture medium.

49. The engineered microbial cell of claim 48, wherein, when cultured, the engineered microbial cell produces 1,5-diaminopentane at a level at least 25 gm/L of culture medium.

50. A method of culturing engineered microbial cells according to any one of claims 1-49, the method comprising culturing the cells under conditions suitable for producing 1,5-diaminopentane.

51. The method of claim 50, wherein the method comprises fed-batch culture, with an initial glucose level in the range of 1-100 g/L, followed controlled sugar feeding.

52. The method of claim 50 or claim 51, wherein the fermentation substrate comprises glucose and a nitrogen source selected from the group consisting of urea, an ammonium salt, ammonia, and any combination thereof.

53. The method of any one of claims 50-52, wherein the culture is pH-controlled during culturing.

54. The method of any one of claims 50-53, wherein the culture is aerated during culturing.

55. The method of any one of claims 50-54, wherein the engineered microbial cells produce 1,5-diaminopentane at a level at least 5 mg/L of culture medium.

56. The method of any one of claims 50-55, wherein the method additionally comprises recovering 1,5-diaminopentane from the culture.

57. A method for preparing 1,5-diaminopentane using microbial cells engineered to produce 1,5-diaminopentane, the method comprising:
(a) expressing a non-native lysine decarboxylase in microbial cells;
(b) cultivating the microbial cells in a suitable culture medium under conditions that permit the microbial cells to produce 1,5-diaminopentane, wherein the 1,5-diaminopentane is released into the culture medium; and
(c) isolating 1,5-diaminopentane from the culture medium.
